(19) United States
(12) Patent Application Publication
(10) Pub. No.: US 2024/0108751 A1
(43) Pub. Date: Apr. 4, 2024

(54) RNA-TARGETING COMPOSITIONS AND METHODS FOR TREATING MYOTONIC DYSTROPHY TYPE 1

(71) Applicant: Locanabio, Inc., San Diego, CA (US)

(72) Inventors: David A. NELLES, San Diego, CA (US); Ranjan BATRA, San Diego, CA (US); Daniela ROTH, San Diego, CA (US); Dimitrios ZISOULIS, San Diego, CA (US); Angeline TA, San Diego, CA (US)

(21) Appl. No.: 18/039,812

(22) PCT Filed: Dec. 1, 2021
(86) PCT No.: PCT/US2021/061490

§ 371 Date: Jun. 1, 2023

Related U.S. Application Data
(60) Provisional application No. 63/278,746, filed on Nov. 12, 2021.
(60) Provisional application No. 63/130,092, filed on Dec. 23, 2020.
(60) Provisional application No. 63/119,977, filed on Dec. 1, 2020.

(51) Int. Cl. A61K 48/00; C07K 14/47; A61P 21/00; C12N 15/11; C12N 9/22; C12N 15/86

(52) U.S. Cl. CPC A61K 48/0041; C07K 14/4705; A61P 21/00; C12N 15/11; C12N 9/22; C12Y 301/01; C12N 15/86; A61K 38/00

(57) ABSTRACT

Disclosed are RNA-targeting gene therapy compositions and methods for destroying or blocking toxic target CUG repeat RNA and treating DM1.

### RELATED APPLICATIONS

[0001] This application claims benefit of, and priority to, U.S. Ser. No. 63/119,977 filed on Dec. 1, 2020, U.S. Ser. No. 63/130,092 filed on Dec. 23, 2020, and U.S. Ser. No. 63/278,746 filed on Nov. 12, 2021; the contents of each are hereby incorporated by reference in their entireties.

### FIELD OF THE DISCLOSURE

[0002] The disclosure is directed to molecular biology, gene therapy, and compositions and methods for modifying expression and activity of RNA molecules.

### INCORPORATION BY REFERENCE OF SEQUENCE LISTING

[0003] The contents of the text file named “LOCN_007_001WO_SeqList_ST25”, which was created on Dec. 1, 2021 and is 1.81 MB in size, are hereby incorporated by reference in their entirety.

### BACKGROUND

[0004] There are long-felt but unmet needs in the art for providing effective RNA-targeting systems which provide effective gene therapies. In particular, the disclosure provides compositions and methods for specifically targeting and destroying toxic RNAs expressed from repetitive tracts in the microsatellite repeat expansion (MRE) disease known as myotonic dystrophy type 1 (DM1). DM1 is a multisystemic, autosomal-dominant inherited disorder caused by CTG MREs in the 3′ untranslated region of the DMPK gene. As for all MRE diseases, available treatments address symptoms of DM1 but do not target its underlying etiology. Elimination of MREs in DNA with genome editing could eliminate the pathogenic MREs causing DM1 but generation of DNA breaks near repeats activates the repair machinery whose activity is linked to expansion growth and may cause further mutation of the repeats and/or may fail to distinguish the pathogenic repeats from the normal repeats which possess regulatory roles in transcription. Other potential DM1 therapeutics have been evaluated, such as antisense oligonucleotides, shRNAs and small molecules, but these suffer from issues related to frequent redosing, poor penetration of affected tissues, lack of direct engagement with repeats, toxicity and off-target effects. In an effort to overcome these issues, Cas9-based RNA-targeting systems (RCas9) have been shown to be capable of specifically targeting toxic CUG repeat RNA and providing long-term repair of the disease phenotypes associated with DM1 in adult onset myotonic dystrophy in mice. However, other non-Cas9 RNA binding systems need to be delineated and developed for providing effective, sustained, and scalable gene therapy for the treatment of DM1. Such non-Cas9 RNA-binding systems targeting CUG MREs are important for manufacturing scale in that the system components are small enough to rely on a unitary vector. These non-RCas9 systems are also important for avoiding any deleterious immunological responses triggered by immunogenic Cas9 components. Accordingly, new and improved RNA-targeting, non-RCas9 gene therapy compositions and systems capable of eliminating toxic CUG repeats, and methods using the same for treating DM1, are provided herein.

### SUMMARY

[0005] The disclosure provides compositions and methods for treating myotonic dystrophy type 1 (DM1). The compositions and methods disclosed herein result in dose-dependent reduction in CUG^{exp} (CUG-repeat expansion) RNA via either destruction or blocking, reduced DMPK, and subsequent correction in alternative splicing and myotonia.

[0006] Disclosed herein is a composition comprising a nucleic acid encoding a non-guided RNA-binding protein comprising a PUF or PUMBY protein capable of binding a toxic target CUG repeat RNA sequence, wherein the RNA-binding protein is not capable of cleaving the toxic target CUG repeat RNA sequence.

[0007] Disclosed herein is a composition comprising a nucleic acid sequence encoding a non-guided RNA-binding fusion protein comprising a) a PUF or PUMBY protein capable of binding a toxic target CUG repeat RNA sequence and b) an endonuclease capable of cleaving the toxic target RNA sequence, wherein the endonuclease is a nuclease domain of a ZC3H12A zinc-finger endonuclease.

[0008] The disclosure provides a composition comprising a nucleic acid sequence encoding an RNA-binding polypeptide comprising a non-guided RNA binding polypeptide or a guided RNA-binding polypeptide capable of binding a toxic target CUG repeat RNA sequence.

[0009] In some embodiments, the RNA-binding polypeptide is a fusion protein.

[0010] In some embodiments, the fusion protein comprises the RNA binding polypeptide fused to an endonuclease capable of cleaving the toxic CUG repeat RNA sequence.

[0011] In some embodiments, the non-guided RNA binding polypeptide is a PUF or PUMBY protein.

[0012] In some embodiments, the guided RNA-binding polypeptide is a Cas13d protein. In some embodiments, the cas13d protein is catalytically dead. In some embodiments, the cas13d protein comprises an amino acid sequence set forth in any one of SEQ ID NOs 583 or 586-589.

[0013] In some embodiments, the endonuclease is a nuclease domain of a ZC3H12A zinc-finger endonuclease.

[0014] In some embodiments, the PUF RNA binding protein comprises an amino acid sequence set forth in any one of SEQ ID NOs 444-451, 461, 570, or 638-649. In some embodiments, the PUF RNA binding protein comprises an amino acid sequence set forth in SEQ ID NO: 444.

[0015] In some embodiments, the toxic target CUG RNA repeat sequence comprises any one of the nucleic acid sequences set forth in SEQ ID NOs 453-456.

[0016] In some embodiments, the toxic target CUG RNA repeat sequence comprises the nucleic acid sequence set forth in SEQ ID NO: 454.

[0017] In some embodiments, the CUG-targeting PUF protein is encoded by a nucleic acid sequence as set forth in SEQ ID NO: 452. In some embodiments, the PUF or PUMBY protein is a human PUF or PUMBY protein.

[0018] In some embodiments, the PUF or PUMBY protein is linked to the ZC3H12A endonuclease by a linker sequence.

[0019] In some embodiments, the linker comprises the amino acid sequence set forth in SEQ ID NO: 411.

[0020] In some embodiments, the fusion protein comprises one or more signal sequences selected from the group consisting of a nuclear localization sequence (NLS), and a nuclear export sequence (NES).

[0021] In some embodiments, the ZC3H12A zinc finger nuclease comprises the amino acid sequence set forth in SEQ ID NO: 358 or SEQ ID NO: 359.

[0022] In some embodiments, the fusion protein comprises the amino acid sequence set forth in any one of SEQ ID NOs 559-567. In some embodiments, the fusion protein is encoded by a nucleic acid sequence comprising SEQ ID NO: 460, SEQ ID NO: 516 or SEQ ID NO: 517.

[0023] In some embodiments, the nucleic acid molecule encoding the fusion protein comprises a promoter. In some embodiments, the promoter is a tCAG promoter, an EFS/UBB promoter, a desmin promoter, a CK8e promoter, or an EFS promoter.

[0024] The disclosure provides a vector comprising a composition of any embodiment of the disclosure.

[0025] In some embodiments, the vector is selected from the group consisting of: adeno-associated virus (AAV), retrovirus, lentivirus, adenovirus, nanoparticle, micelle, liposome, lipoplex, polymersome, polyplex, and dendrimer. In some embodiments, is an AAV vector. The disclosure provides an AAV vector of any embodiment of the disclosure, wherein the AAV vector comprises: a first AAV ITR sequence; a first promoter sequence; a polynucleotide sequence encoding for at least one CUG-repeat RNA binding polypeptide; and a second AAV ITR sequence.

[0026] In some embodiments, the CUG-repeat RNA binding polypeptide comprises a PUF or PUMBY protein. In some embodiments, the polynucleotide sequence encoding the PUF or PUMBY sequence comprises a nucleic acid sequence set forth in SEQ ID NO: 452.

[0027] In some embodiments, the CUG-repeat RNA binding polypeptide comprises a Cas13d protein. In some embodiments, the polynucleotide sequence encoding the Cas13d sequence comprises a nucleic acid sequence set forth in SEQ ID NO: 601, 612, or 615-618.

[0028] In some embodiments, the first promoter sequence comprises a nucleic acid sequence set forth in SEQ ID NO:568, 569, 608, 609, 634-637.

[0029] In some embodiments, the first AAV ITR sequence comprises a nucleic acid sequence set forth in SEQ ID NO: 599 or 600. In some embodiments, the second AAV ITR sequence comprises a nucleic acid sequence set forth in SEQ ID NO: 599 or 600.

[0030] In some embodiments, the vector further comprises a second promoter sequence. In some embodiments, the second promoter controls expression of a guide RNA (gRNA) wherein the gRNA comprises (i) a DR sequence and (ii) a spacer sequence. In some embodiments, the second promoter comprises a nucleic acid sequences set forth in SEQ ID NO: 519.

[0031] In some embodiments, the vector further comprises a polyA sequence. In some embodiments, the vector comprises at least one linker sequence. In some embodiments, the vector comprises at least one nuclear localization sequence.

[0032] In some embodiments, the vector is encoded be a nucleic set forth in any of one of SEQ ID NO: 574-582, 584-585, 590-597.

[0033] The disclosure provides a pharmaceutical composition comprising: a) the AAV viral vector of any embodiment of the disclosure; and b) at least one pharmaceutically acceptable excipient and/or additive.

[0034] The disclosure provides an AAV viral vector comprising: a) an AAV vector of any embodiment of the disclosure; and b) an AAV capsid protein. In some embodiments, the AAV capsid protein is an AAV1 capsid protein, an AAV2 capsid protein, an AAV4 capsid protein, an AAV5 capsid protein, an AAV6 capsid protein, an AAV7 capsid protein, an AAV8 capsid protein, an AAV9 capsid protein, an AAV10 capsid protein, an AAV11 capsid protein, an AAV12 capsid protein, an AAV13 capsid protein, an AAVPHP.B capsid protein, an AAVrh74 capsid protein or an AAVrh.10 capsid protein. In some embodiments, the AAV capsid protein is an AAV9 capsid protein

[0035] A cell comprising the vector of any one of the embodiments of the disclosure.

[0036] The disclosure provides a method of treating myotonic dystrophy type 1 (DM1) in a mammal comprising administering a composition or AAV vector according to any embodiment of the disclosure to a toxic target CUG microsatellite repeat expansion (MRE) RNA sequence in tissues of the mammal whereby the level of expression of the toxic target RNA is reduced.

[0037] In some embodiments, the composition or AAV vector is administered to the subject intravenously, intrathecally, intracerebrally, intraventricularly, intranasally, intratracheally, intra-aurally, intra-ocularly, or peri-ocularly, orally, rectally, transmucosally, inhalationally, transdermally, parenterally, subcutaneously, intradermally, intramuscularly, intracistemally, intranervally, intrapleurally, topically, intralymphatically, intracisternally or intranerve.

[0038] In some embodiments, the composition or AAV vector is administered to the subject intravenously.

[0039] In some embodiments, the reduced level of expression of the toxic target RNA thereby ameliorates symptoms of DM1 in the mammal. In some embodiments, the level of expression of the toxic target RNA is reduced compared to the reduction in the level of expression of untreated toxic target CUG RNA. In some embodiments, the level of reduction is between 1-fold and 20-fold.

[0040] In some embodiments, the PUF RNA binding protein comprises an amino acid sequence set forth in any one of SEQ ID NOs 444-451, 461, 570, or 638-649.

[0041] In some embodiments, the PUF RNA binding protein comprises an amino acid sequence set forth in SEQ ID NO: 444.

[0042] In some embodiments, the toxic target CUG RNA repeat sequence comprises any one of SEQ ID NOs 453-456.

[0043] In some embodiments, the toxic target CUG RNA repeat sequence comprises SEQ ID NO: 454.

[0044] In some embodiments, the CUG-targeting PUF protein is encoded by a nucleic acid sequence as set forth in SEQ ID NO: 452.

[0045] In some embodiments, the PUF or PUMBY protein is a human PUF or PUMBY protein.

[0046] In some embodiments, the PUF or PUMBY protein is linked to the ZC3H12A by a linker sequence.

[0047] In some embodiments, the linker comprises the amino acid sequence set forth in SEQ ID NO: 411.

[0048] In some embodiments, the fusion protein comprises one or more signal sequences selected from the group consisting of a nuclear localization sequence (NLS), and a nuclear export sequence (NES).

[0049] In some embodiments, the ZC3H12A zinc finger nuclease comprises the amino acid sequence set forth in SEQ ID NO: 358 or SEQ ID NO: 359.

[0050] In some embodiments, the fusion protein comprises the amino acid sequence set forth in any one of SEQ ID NOs 559-567.

[0051] In some embodiments, the fusion protein is encoded by a nucleic acid sequence comprising SEQ ID NO: 460, SEQ ID NO: 516 or SEQ ID NO: 517.

[0052] In some embodiments, the nucleic acid molecule encoding the fusion protein comprises a promoter.

[0053] In some embodiments, the promoter is a tCAG promoter.

[0054] The disclosure provides a vector comprising any of the preceding compositions.

[0055] In some embodiments, the vector is selected from the group consisting of: adeno-associated virus (AAV), retrovirus, lentivirus, adenovirus, nanoparticle, micelle, liposome, lipoplex, polymersome, polyplex, and dendrimer. In some embodiments, the vector is an AAV vector. In some embodiments, the AAV vector is AAV9 or AAVrh74.

[0056] The disclosure provides a cell comprising the vector of the disclosure.

[0057] Disclosed herein is a method of treating myotonic dystrophy type 1 (DM1) in a mammal comprising administering a composition to a toxic target CUG microsatellite repeat expansion (MRE) RNA sequence in tissues of the mammal, wherein the composition comprises a nucleic acid sequence encoding a non-guided RNA-binding fusion protein comprising a) a PUF RNA-binding protein capable of binding a toxic target CUG RNA repeat sequence, and b) an endonuclease capable of cleaving the toxic target CUG RNA repeat sequence, whereby the level of expression of the toxic target RNA is reduced.

[0058] In some embodiments, the PUF RNA binding protein comprises any one of SEQ ID NOs 444-451, 461, 570, or 638-649.

[0059] In some embodiments, the PUF RNA binding protein comprises SEQ ID NO: 444.

[0060] In some embodiments, the toxic target CUG RNA repeat sequence comprises any one of SEQ ID NOs 453-456.

[0061] In some embodiments, the toxic target CUG RNA repeat sequence comprises SEQ ID NO: 453.

[0062] In some embodiments, the composition is administered to the tissue of the mammal by intravenous administration.

[0063] In some embodiments, the reduced level of expression of the toxic target RNA thereby ameliorates symptoms of DM1 in the mammal.

[0064] In some embodiments, the level of expression of the toxic target RNA is reduced compared to the reduction in the level of expression of untreated toxic target CUG RNA.

[0065] In some embodiments, the level of reduction is between 1-fold and 20-fold.

[0066] In some embodiments, the endonuclease is a ZC3H12A zinc-finger endonuclease.

[0067] In some embodiments, the ZC3H12A zinc finger nuclease comprises the amino acid sequence set forth in SEQ ID NO: 358 or SEQ ID NO: 359.

[0068] In some embodiments, the nucleic acid sequence encoding the fusion protein comprises a promoter.

[0069] In some embodiments, the promoter is a tCAG promoter.

[0070] In some embodiments, the promoter is a muscle-specific promoter.

[0071] In some embodiments, the muscle-specific promoter is a desmin promoter (full-length or truncated).

[0072] In some embodiments, the fusion protein comprises the amino acid sequences set forth in any one of SEQ ID NOs 559-567.

[0073] In some embodiments, the fusion protein is encoded by a nucleic acid sequence comprising SEQ ID NO: 460, SEQ ID NO: 516 or SEQ ID NO: 517.

[0074] A composition comprising a nucleic acid sequence encoding a non-naturally occurring or engineered clustered regularly interspaced short palindromic repeats (CRISPR)-associated (Cas) system comprising: (a) at least one RNA-guided RNase Cas protein; and b) at least one cognate CRISPR-Cas system guide RNA (gRNA) capable of forming a complex with one of the at least one Cas proteins, wherein the gRNA comprises (i) a DR sequence and (ii) a spacer sequence, wherein the spacer sequence hybridizes with the target CUG MRE molecule, and wherein the spacer sequence comprises a spacer sequence selected from the group consisting of: agcagcagcagcagcagcagcagcag (SEQ ID NO: 457), gcagcagcagcagcagcagcagcagc (SEQ ID NO: 458), and cagcagcagcagcagcagcagcagca (SEQ ID NO: 459), or a portion thereof, wherein the CRISPR-Cas system is capable of binding and cleaving the target CUG MRE.

[0075] A composition comprising a nucleic acid sequence encoding a non-naturally occurring or engineered clustered regularly interspaced short palindromic repeats (CRISPR)-associated (Cas) system comprising: (a) at least one RNA-guided RNase Cas protein; and b) at least one cognate CRISPR-Cas system guide RNA (gRNA) capable of forming a complex with one of the at least one Cas proteins, wherein the gRNA comprises (i) a DR sequence and (ii) a spacer sequence, wherein the spacer sequence hybridizes with the target CUG MRE molecule, and wherein the spacer sequence comprises a spacer sequence selected from the group consisting of: agcagcagcagcagcagcagcagcag (SEQ ID NO: 457), gcagcagcagcagcagcagcagcagc (SEQ ID NO: 458), and cagcagcagcagcagcagcagcagca (SEQ ID NO: 459), or a portion thereof, wherein the CRISPR-Cas system is capable of binding and cleaving the target CUG MRE, wherein the CRISPR-Cas system is catalytically inactive, and wherein the CRISPR-Cas is capable of binding but not cleaving the target CUG MRE.

[0076] In some embodiments, the Cas protein is Cas13a, Cas13b, Cas13c, or Cas13d. In some embodiments, the Cas protein is Cas13d.

[0077] In some embodiments, the RNA-guided RNase Cas protein or the non-guided RNA-binding polypeptide is a first RNA-binding polypeptide which is fused with a second RNA-binding polypeptide. In one embodiment, the second RNA-binding polypeptide is capable of binding RNA in a manner in which it associates with RNA. In some embodiments, the second RNA-binding polypeptide is capable of associating with RNA in a manner in which it cleaves RNA. In one embodiment, the second RNA-binding polypeptide is a nuclease domain of a ZC3H12A zinc-finger endonuclease.

[0078] In some embodiments, nucleic acid encoding the Cas or dCas system comprises a promoter. In some embodiments, the promoter is an EFS promoter. In some embodiments, the promoter is a muscle-specific promoter. In some embodiments, the muscle-specific promoter is a desmin promoter (full-length or truncated)

[0079] Disclosed herein is a vector comprising any of the preceding compositions.

[0080] In another embodiment, the vector is selected from the group consisting of: adeno-associated virus (AAV), retrovirus, lentivirus, adenovirus, nanoparticle, micelle, liposome, lipoplex, polymersome, polyplex, and dendrimer.

[0081] In another embodiment, the vector is an AAV vector.

[0082] In another embodiment, the AAV vector is AAV9 or AAVrh74.

[0083] Disclosed herein is a cell comprising the vector.

### BRIEF DESCRIPTION OF THE DRAWINGS

[0084] The patent or application file contains at least one drawing executed in color. Copies of this patent or patent application publication with color drawing(s) will be provided by the Office upon request and payment of the necessary fee.

[0085] FIG. 1 shows results of a CUG⁹⁶⁰ qPCR assay which demonstrate exemplary embodiments of the CUG-targeting Cas13d compositions and PUF compositions disclosed herein destroy DM1 toxic CUG repeats. Reduction of the toxic repeats in a Cas13d-based system (labeled Cas13d-L1) is shown using three different guides CUG-g1, CUG-g2, and CUG-g3. Reduction of the toxic repeats in a PUF-based system is shown using an exemplary nucleic acid molecule encoding a PUF(CUG)-E17 fusion protein (labeled CUG-f1) and an E17-PUF(CUG) fusion protein (labeled CUG-f2). E17 is a domain of the ZC3H12A endonuclease. Results are normalized to non-targeting controls and shown as mean +/−s.d. of biological replicates (n=2).

[0086] FIG. 2 shows the results of an RNA Fluorescence In Situ Hybridization (FISH) assay with the exemplary CUG-targeting Cas13d and PUF compositions disclosed herein as compared to non-targeting controls.

[0087] FIG. 3 shows the results of a CUG⁹⁶⁰ qPCR assay which demonstrates destruction of the DM1 toxic CUG repeat RNA using the Cas13d compositions and PUF compositions disclosed herein as compared to the RCas9 system. Results were normalized to non-targeting controls and are shown as mean +/−s.d. of biological replicates (n=2).

[0088] FIG. 4A-C shows exemplary vector configurations of the DM1 gene therapy compositions disclosed herein. FIG. 4A illustrates a DM1 gene therapy construct configuration comprising CUG-targeting PUF-E17 operably linked to truncated CAG promoter (ICAG). FIG. 4B illustrates a DM1 gene therapy construct configuration comprising a CUG-targeting catalytically dead Cas13d fused to E17 and corresponding guide operably linked to EFS promoter. FIG. 4C illustrates a DM1 gene therapy construct configuration comprising a CUG-targeting Cas13d and corresponding guide operably linked to EFS promoter.

[0089] FIG. 5 depicts an alignment of a CUG-targeting PUF with human PUM1 with mismatches highlighted.

[0090] FIG. 6A-B shows results of a CUG⁹⁶⁰ assay. FIG. 6A shows knockdown of DMPK-CUG⁹⁶⁰ reporter mRNA. Specifically, Cas13d-CUG (A01215) decreases CUG⁹⁶⁰ repeat mRNA expression in CosM6 cells. Levels of CUG⁹⁶⁰ repeat mRNA (in context of human DMPK exons 11-15) are normalized to the reference gene GAPDH and transfection control GFP (expressed from the same plasmid as CUG⁹⁶⁰). Data are expressed as fold change in cells transfected with Cas13d-CUG relative to cells transfected with Cas13d non-targeting (NT) negative controls (n=3 different experiments). FIG. 6B shows that endogenous DMPK mRNA is preserved. Specifically, Cas13d-CUG did not decrease normal DMPK mRNA levels in HEK293 cells whereas a Cas13d-DMPK positive control targeting a repeat flanking region knocked down total DMPK mRNA by 58%.

[0091] FIG. 7 depicts two mechanisms of action for DM1 gene therapy: 1) Repeat destruction, and 2) Repeat blocking.

[0092] FIG. 8 shows three different embodiments of the DM1 AAV-based gene therapy compositions disclosed herein packaged in AAV9 vectors. Specifically, FIG. 8 depicts 1) therapeutic construct A01215 for destruction of the repetitive CUG based on a CRISPR/Cas13d system with cognate CUG targeting gRNA, 2) therapeutic construct A01344 for destruction of the repetitive CUG based on a PUF (Human PUM1-derived) protein fused with a human endonuclease domain (E17) engineered to target and cleave repetitive CUG RNA, and 3) therapeutic construct A01686 based on a PUF (Human PUM1-derived) protein engineered to target and bind (but not cleave) repetitive CUG RNA.

[0093] FIG. 9A-B show reduction of nuclear CUG^{exp} foci in patient muscle cells. FIG. 9A shows RNA-FISH to evaluate nuclear CUG^{exp} RNA foci in DM1 patient myocytes (2600 CUG repeats) treated with modified AAVrh74 (eAAV) encoding GFP (A01475—Control), Cas13d-CUG (A01215), or PUF(CUG)-E17 (A01344). FIG. 9B shows quantification of RNA FISH for number of nuclear CUG^{exp} RNA foci normalized to eAAV-GFP (A01475-control) demonstrating dose dependent reduction of toxic CUG RNA foci with A01215 (Cas13d-CUG) and A01344 (PUF(CUG)-E17).

[0094] FIG. 10A-G shows destruction of CUG^{exp} RNA and correction of DM1-associated mis-splicing and myotonia in HSA_{LR} DM1 mice. FIG. 10A depicts the mechanism of action of AAV-based A01215(Cas13d-CUG) and A01344 (PUF(CUG)-E17) mediated destruction of CUG^{exp} and consequent correction of alternative splicing and myotonia. FIG. 10B depicts the injection scheme showing injections of the vehicle and treatment in contralateral tibialis anterior (TA). FIG. 10C shows reduction of nuclear CUG^{exp} RNA foci in treated TA muscle using RNA-FISH with CAG10 probe. FIG. 10D shows a dose dependent decrease in HSA-CUG^{exp} RNA with AAV9-based A01344 (PUF(CUG)-E17) using RT-ddPCR. FIG. 10E-F shows correction of alternative splicing of DM1-associated Atp2a1 Exon 22 and ClCn1 Exon 7a, respectively, using semi quantitative RT-PCR followed by capillary electrophoresis. FIG. 10G shows reduction in myotonia represented as % of needle insertions resulting in myotonic runs using needle electromyography (EMG).

[0095] FIG. 11A-G shows blocking of CUG^{exp} RNA and correction of DM1-associated mis-splicing and myotonia in HSA_{LR} DM1 mice. FIG. 11A depicts the mechanism of action of AAV-based A01686 (PUF(CUG)) mediated blocking of CUG^{exp} and consequent correction of alternative splicing and myotonia. FIG. 11B depicts the injection scheme showing injections of the vehicle and treatment in contralateral tibialis anterior (TA). FIG. 11C shows reduction of nuclear CUG^{exp} RNA foci in treated TA muscle using RNA-FISH with CAG10 probe. FIG. 11D shows a dose dependent decrease in HSA-CUG^{exp} RNA with AAV9-based A01686 (PUF(CUG)) using RT-ddPCR. FIG. 11E-F shows correction of alternative splicing of DM1-associated Atp2a1 Exon 22 and ClCn1 Exon 7a, respectively, using semi quantitative RT-PCR followed by capillary electrophoresis. FIG. 11G shows reduction in myotonia represented as % of needle insertions resulting in myotonic runs using needle electromyography (EMG).

[0096] FIG. 12A-B depicts exemplary vector configurations of the DM1 blocking (without cleavage) gene therapy compositions disclosed herein. FIG. 12A shows several PUF(CUG) embodiments and FIG. 12B shows several dCas13d(CUG) embodiments.

### DETAILED DESCRIPTION

[0097] The disclosure provides RNA-targeting gene therapy compositions and methods for treating myotonic dystrophy type 1 (DM1).

[0098] DM1 is a multisystemic, autosomal-dominant inherited disorder caused by CTG microsatellite repeat expansions (MREs) in the 3′ untranslated region of the DMPK gene. RNA transcripts containing the CUG repeat expansions sequester muscleblind-like (MBNL) proteins which are the regulators of the alternative splicing switch from fetal to adult isoforms. Adult DM1 patients experience debilitating myotonia and progressive weakness in skeletal muscle while infants born with DM1 (congenital DM or CDM) are hypotonic and display respiratory insufficiency. The DMPK gene encodes a protein called myotonic dystrophy protein kinase which is believed to play a role in muscle, heart, and brain cells. The protein may be involved in communication within cells. It also appears to regulate the production and function of important structures inside muscle cells by interacting with other proteins. For example, myotonic dystrophy protein kinase has been shown to inhibit part of a muscle protein called myosin phosphatase. Myosin phosphatase is an enzyme that plays a role in muscle tensing (contraction) and relaxation. One region of the DMPK gene contains a segment of three DNA building blocks (nucleotides) that is repeated multiple times. This sequence, which is written as CTG, is called a triplet or trinucleotide repeat. In most unaffected people, the number of CTG repeats in this gene ranges from 5 to 34. In DM1 patients, there is a CTG repeat expansion which increases the size of the CTG repeat in the DMPK gene. DM1 is classified as either adult-onset or as congenital forms that are distinguished by the size of the expanded CTG tract. Repeats in such CTG repeat expansions can range from about 50 to about 1,000 CTG repeats in most cells and in certain cell types, such as muscle cells, the number of repeats are typically greater. Indeed, the size of the trinucleotide repeat expansion is associated with the severity of signs and symptoms of DM1. Classic features such as muscle weakness and wasting beginning in adulthood and correlate with about 100 to about 1,000 CTG repeats per cell. The more severe congenital form of DM1 tends to correlate with over 1,000 CTG repeats per cell. The mild form of DM1 typically ranges from about 50 to about 150 CTG repeats per cell. DM1 is classified as either adult-onset or as congenital forms that are distinguished by the size of the expanded CTG tract. The repetitive RNAs produced by DMPK locus form nuclear RNA foci that sequester RNA binding proteins such as MBNL1 (Muscleblind Like Splicing Regulator 1) and divert them from their homeostatic RNA processing activities. Loss of MBNL1 function is linked to hundreds of alternative splicing defects and respiratory insufficiency which contribute in varying degrees to patient mortality. Targeting and eliminating (or blocking) CUG repeats is a therapeutic strategy for DM1.

[0099] The gene therapy compositions disclosed herein provide efficacious cleavage or blocking of toxic CUG repeats in methods of treating DM1. Building on prior work using RCas9 systems, disclosed herein are multiple RNA-binding systems which do not rely on RCas9 system components. While Cas9-based RNA-targeting systems (RCas9) are capable of specifically targeting toxic CUG repeat RNA and providing long-term repair of the disease phenotypes associated with DM1 in adult onset myotonic dystrophy in mice, other non-Cas9 RNA binding systems disclosed herein provide efficient cleavage or blocking of toxic CUG repeat RNA. Such non-Cas9 RNA-binding systems targeting CUG MREs are important for scaling of therapeutic systems in manufacturing. In particular, the non-Cas9 system components are a small enough size to rely on a unitary (single) vector. The non-RCas9 systems disclosed herein are capable of achieving effective knockdown or blocking of the toxic CUG repeats compared to RCas9 systems and non-RCas9 systems are also important for avoiding any deleterious immunological responses triggered by immunogenic and unwieldy Cas9 components.

[0100] Disclosed herein are compositions comprising nucleic acid molecules, and vectors comprising the same, encoding non-Cas9 RNA-binding systems capable of binding toxic CUG repeat RNA for treating DM1. Such compositions are capable of targeting and binding for either knockdown/destruction or blocking the toxic CUG repeats, both mechanisms (destruction and blocking) causing a correction of MBNL sequestration, alternative splicing, and myotonia. Indeed, in one embodiment, a gene therapy blocking composition comprising PUF(CUG) will bind CUG^{exp} RNA directly and block MBNL sequestration to preserve near normal free MBNL levels and function that will reverse DM1 disease phenotypes such as splicing dysfunction, myotonia and others. In some aspects, compositions suitable for blocking CAG-repeat RNA bind a CUG-repeat containing RNA and prevent translation of the CUG-repeat RNA. In some aspects, this prevented translation results in reduced protein expression from CUG-repeat containing RNA sequences. These systems disclosed herein comprise either RNA-guided RNase Cas or non-guided PUF, PUMBY or PPR protein configurations.

[0101] In some embodiments, the guided or non-guided CUG-repeat targeting system targets expanded CUG repeats (CUG^{exp}), wherein the CUG repeats are CUG⁵⁰ or more. In some embodiments, the CUG repeats are CUG¹⁰⁰ or more. In some aspects, the CUG repeats are CUG⁵⁰⁰ or more. In some aspects, the CUG repeats are CUG⁹⁶⁰. In some aspects, the CUG¹⁰⁰⁰ repeats are 1000 CUG repeats or more. To be clear, CUG⁵⁰ or CUG¹⁰⁰ or CUG⁹⁶⁰ or CUG¹⁰⁰⁰ refers to 50 CUG repeats or 100 CUG repeats or 960 CUG repeats or 1000 CUG repeats, respectively, in a CUG repeat containing gene. Any other number or range of CUG repeats are possible, including 50, 55, 60, 65, 70, 75, 76, 77, 78, 79, 80, 81, 82, 83, 84, 85, 90, 95, 100, 105, 110, 115, 120, 150, 180, 200, 250, 300, 350, 400, 450, 500, 550, 600, 650, 700, 750, 800, 850, 900, 950, 960, 1000 CUG repeats, or any other number of CUG repeats in between.

[0102] In any of the preceding or subsequent RNA-targeting compositions for treating DM1, any particular construct element (e.g., linker, promoter, signal sequence, etc.) described in the context of a specific RNA-targeting composition, can be substituted for another of the same element type (e.g., linker, promoter, signal sequence, etc.). In some embodiments, any particular construct element can be omitted or removed (such as a tag sequence). In other words, the exemplary combinations of elements in any particular gene therapy composition described herein is not intended to be limiting.

### RNA-Guided CUG-Repeat RNA Binding Systems

[0103] In some embodiments, the non-Cas9-binding system is comprised of an RNA-guided RNA-binding polypeptide. In some embodiments, a nucleic acid sequence encodes an RNA-guided RNA-binding polypeptide which is an RNase Cas protein (or a deactivated RNase Cas protein). In one embodiment, the nucleic acid sequence further comprises a gRNA sequence comprising a spacer sequence which binds to a toxic target CUG repeat RNA and a direct repeat (DR) sequence which binds to the RNase Cas protein. In one embodiment, a Cas13d(CUG) system is catalytically active, in which case, the Cas13d nucleoprotein complex cleaves and destroys toxic RNA CUG repeats. In another embodiment, a Cas13d(CUG system is catalytically inactive, in which case, the Cas13d nucleoprotein complex binds and blocks (but does not cleave) the RNA CUG repeats. In yet another embodiment, a Cas13d(CUG) comprises a catalytically inactive Cas13d(CUG) fused to an endonuclease which is capable of cleaving the toxic RNA CUG repeats. In such an embodiment, the endonuclease is an active RNase. Exemplary endonucleases with RNase activity can be found herein and these include, for example, a domain from a ZC3H12A zinc-finger (also referred herein as E17) or a PIN endonuclease. In some embodiments, a nucleic acid sequence encoding a CUG-repeat targeting composition comprises a first promoter sequence that controls expression of a Cas13d protein or Cas13d fusion protein and a second promoter sequences that controls expression of the at least one guide RNA sequence.

TABLE 1
Exemplary spacer sequences used in
sgRNAs for CUG targeting with
RNase Cas systems for treating DM1:

| Spacer | Spacer Sequences |
|---|---|
| 1 | agcagcagcagcagcagcagcagcag |
| | (SEQ ID NO: 457) |
| 2 | gcagcagcagcagcagcagcagcagc |
| | (SEQ ID NO: 458) |
| 3 | cagcagcagcagcagcagcagcagca |
| | (SEQ ID NO: 459) |

[0104] In one embodiment, the RNase Cas protein is a Cas13 protein. In another embodiment, the Cas13 protein is a Cas13d protein. In another embodiment, the Cas13d protein is a deactivated RNase Cas13d protein (dCas13d). In another embodiment, the dCas13d protein is a fusion protein comprising 1) dCas13d and 2) a polypeptide encoding a protein or fragment thereof having nuclease activity. In another embodiment, the dCas13d protein is a fusion protein comprising 1) dCas13d and 2) ZC3H12A, a zinc-finger endonuclease or a truncated version thereof (referred to as E17 or SEQ ID NO: 358 herein). In some embodiments, the Cas configuration comprises a signal sequence(s) such as NLS(s) and/or NES(s). In some embodiments, the dCas13d is linked to the E17 endonuclease via a linker sequence. In one embodiment, the linker sequence is VDTANGS (SEQ ID NO: 411). In some embodiments, the Cas13d or dCas13d fusion proteins are operably linked to a promoter sequence. In some embodiments, the promoter sequence comprises an enhancer and/or an intron. In some embodiments, the promoter sequence is an EFS promoter sequence (FIGS. 4B and 4C).

[0105] In some embodiments, a CUG-repeat targeting cas13d or dCas13d protein of the disclosure comprises from N-terminal to C-terminal: Cas13d (Seq212), a linker, and an SV-40 NLS. In some aspects, the CUG-repeat targeting dCas13d protein is used for methods of blocking CUG-repeat RNA sequence expression.

Active Cas13d (Seq212) with truncated
Desmin promoter (A02207)

| Plasmid Element | Amino Acid Sequences |
|---|---|
| Cas13d Seq212 | KKKHQSAAEKRQVKKLKNQEKAQKY |
| | ASEPSPLQSDTAGVECSQKKTVVSH |
| | IASSKTLAKAMGLKSTLVMGDKLVI |
| | TSFAASKAVGGAGYKSANIEKITDL |
| | QGRVIEEHERMFSADVGEKNIELSK |
| | NDCHTNVNNPVVTNIGKDYIGLKSR |
| | LEQEFFGKTFENDNLHVQLAYNILD |
| | IKKILGTYVNNIIYIFYNLNRAGTG |
| | RDERMYDDLIGTLYAYKPMEAQQTY |
| | LLKGDKDMRRFEEVKQLLQNTSAYY |
| | VYYGTLFEKVKAKSKKEQRAKEAEI |
| | DACTAHNYDVLRLLSLMRQLCMHSV |
| | AGTAFKLAESALFNIEDVLSADLKE |
| | ILDEAFSGAVNKLNDGFVQHSGNNL |
| | YVLQQLYPNETIERIAEKYYRLTVR |
| | KEDLNMGVNIKKLRELIVGQYFPEV |
| | LDKEYDLSKNGDSVVTYRSKIYTVM |
| | NYILLYYLEDHDSSRESMVEALRQN |
| | REGDEGKEEIYRQFAKKVWNGVSGL |
| | FGVCLNLFKTEKRNKFRSKVALPDV |
| | SGAAYMLSSENIDYFVKMLFFVCKF |
| | LDGKEINELLCALINKFDNIADILD |
| | AAAQCGSSVWFVDSYRFFERSRRIS |
| | AQIRIVKNIASKDFKKSKKDSDESY |
| | PEQLYLDALALLGDVISKYKQNRDG |
| | SVVIDDQGNAVLTEQYKRFRYEFFE |
| | EIKRDESGGIKYKKSGKPEYNHQRR |
| | NFILNNVLKSKWFFYVVKYNRPSSC |
| | RELMKNKEILRFVLRDIPDSQVRRY |
| | FKAVQGEEAYASAEAMRTRLVDALS |
| | QFSVTACLDEVGGMTDKEFASQRAV |
| | DSKEKLRAIIRLYLTVAYLITKSMV |
| | KVNTRFSIAFSVLERDYYLLIDGKK |
| | KSSDYTGEDMLALTRKFVGEDAGLY |
| | REWKEKNAEAKDKYFDKAERKKVLR |
| | QNDKMIRKMHFTPHSLNYVQKNLES |
| | VQSNGLAAVIKEYRNAVAHLNIINR |
| | LDEYIGSARADSYYSLYCYCLQMYL |
| | SKNFSVGYLINVQKQLEEHHTYMKD |
| | LMWLLNIPFAYNLARYKNLSNEKLF |
| | YDEEAAAEKADKAENERGE |
| | (SEQ ID NO: 572) |
| Linker | GS |
| SV-40 NLS | PKKKRKV (SEQ ID NO: 571) |

### Non-Guided CUG-Repeat RNA Binding Systems

[0106] In some embodiments, the non-Cas9 RNA-binding system does not comprise an RNA-guided RNA-binding polypeptide. Instead, the non-Cas9 RNA-binding system is comprised of a non-RNA-guided RNA-binding polypeptide such as a PUF protein or a PUMBY protein, or RNA-binding portion thereof. In one embodiment, a non-guided RNA-binding fusion protein disclosed herein comprises a) a PUF or PUMBY RNA-binding sequence capable of binding a toxic target CUG repeat sequence comprising UGCUGCUG (SEQ ID NO: 453) and b) an endonuclease capable of cleaving the toxic target CUG repeat sequence.

[0107] In one embodiment, the target RNA sequence is selected from the group consisting of UGCUGCUGCUGCUG (SEQ ID NO: 454), UGCUGCUGCUGCUGC (SEQ ID NO: 455), and UGCUGCUGCUGCUGCU (SEQ ID NO: 456).

[0108] In one embodiment, the target RNA sequence is selected from the group consisting of CUGCUGCU (SEQ ID NO: 472), CUGCUGCUGCUGCU (SEQ ID NO: 473), CUGCUGCUGCUGCUG (SEQ ID NO: 474), and CUGCUGCUGCUGCUGC (SEQ ID NO: 475).

[0109] In one embodiment, the target RNA sequence is selected from the group consisting of GCUGCUGC (SEQ ID NO: 476), GCUGCUGCUGCUGC (SEQ ID NO: 477), GCUGCUGCUGCUGCU (SEQ ID NO: 478), and GCUGCUGCUGCUGCUG (SEQ ID NO: 479).

[0110] In one embodiment, the PUF or PUMBY RNA-binding fusion protein comprises a) PUF or PUMBY CUG-targeting protein and b) ZC3H12A, a zinc-finger endonuclease or a truncated version thereof (referred to as E17 or SEQ ID NO: 358 herein). In some embodiments, the CUG-targeting PUF or PUMBY fusion protein is configured N-terminal to C-terminal as follows:
[0111] PUF(CUG)-E17
[0112] E17-PUF(CUG)
[0113] PUMBY(CUG)-E17, or
[0114] E17-PUMBY(CUG).

[0115] In some embodiments, the PUF or PUMBY fusion configurations include a linker between the PUF(CUG) or PUMBY(CUG) and the E17. In one embodiment, the linker sequence is VDTANGS (SEQ ID NO: 411).

[0116] In some embodiments, the CUG-targeting PUF or PUMBY fusion protein comprising a linker is configured N-terminal to C-terminal as follows:
[0117] PUF(CUG)-linker-E17
[0118] E17-linker-PUF(CUG)
[0119] PUMBY(CUG)-linker-E17; or
[0120] E17-linker-PUMBY(CUG).

[0121] An exemplary embodiment of the N- to C-terminal orientation of a PUF(CUG)-linker-E17 is the first orientation CUG frame (CUG-f1) of FIG. 1 which is orientated N- to C-terminal as PUF(CUG)-E17. An exemplary embodiment of the N- to C-terminal orientation of a E17-linker-PUF(CUG) is the second orientation CUG frame (CUG-f2) of FIG. 1 which is orientated N- to C-terminal as E17-linker-PUF(CUG).

[0122] In one embodiment, the CUG-targeting PUF or PUMBY fusion protein configuration from N-terminal to C-terminal is PUF(CUG)-VDTANGS-E17 or PUMBY(CUG)-VDTANGS-E17. In another embodiment, the CUG-targeting PUF or PUMBY fusion protein configuration from N-terminal to C-terminal is E17-VDTANGS-PUF(CUG) or E17-VDTANGS-PUMBY(CUG).

[0123] In some embodiments, the PUF or PUMBY configurations include one or more tags or signal sequences such as FLAG, NLS, NES or a combination thereof. In one embodiment, the FLAG tag sequence is DYKDDDDK (SEQ ID NO: 436). In one embodiment, the NLS signal sequence is a human NLS. In one embodiment, the NES is a human NES. In one embodiment, the NLS is a SV40 NLS. In another embodiment, the SV40 NLS sequence is PKKKRKV (SEQ ID NO: 437). In one embodiment, the configuration comprises two different tags and/or signal sequences. In another embodiment, the configuration comprises two or more signal sequences. In some embodiments, the tag(s) and/or signal(s) is/are located at the N-terminal. In some embodiments, the tag(s) and/or signal(s) is/are located at the C-terminal. In some embodiments, a tag(s) and/or signal(s) is/are located at the N-terminal and a tag(s) and/or signal(s) is/are located at the C-terminal. In one embodiment, the CUG-targeting PUF or PUMBY fusion protein comprising one or more tags and/or signals is/are configured N-terminal to C-terminal as follows:
[0124] FLAG-NLS-PUF(CUG)-linker-E17; or
[0125] FLAG-NLS-PUMBY(CUG)-linker-E17;
[0126] NLS-PUF(CUG)-linker-E17; or
[0127] NLS-PUMBY(CUG)-linker-E17.

[0128] In one embodiment, the CUG-targeting PUF or PUMBY fusion protein comprising one or more tags and/or signal(s) is/are configured N-terminal to C-terminal as follows:
[0129] FLAG-NLS-PUF(CUG)-VDTANGS-E17; or
[0130] FLAG-NLS-PUMBY(CUG)-VDTANGS-E17;
[0131] NLS-PUF(CUG)-VDTANGS-E17; or
[0132] NLS-PUMBY(CUG)-VDTANGS-E17.

[0133] Table 2A-2B: Exemplary PUF configurations for targeting CUG MRE:

[0134] PUF targeting CUG (DM1) with endonuclease for destruction:

| Protein | | Target | Amino Acid |
|---|---|---|---|
| Type | Elements | Sequence | Sequence of PUF |
| 8PUF | N-terminal | UGCUGCUG | GRSRLLEDFRNNRYP |
| | SV40 NLS; | (SEQ ID | NLQLREIAGHIMEFS |
| | Linker | NO: | QDQHGSRFIELKLER |
| | between | 453) | ATPAERQLVFNEILQ |
| | PUF and E17 | | AAYQLMVDVFGNYVI |
| | endonuclease | | QKFFEFGSLEQKLAL |
| | (VDTANGS); | | AERIRGHVLSLALQM |
| | C-terminal | | YGSYVIRKALEFIPS |
| | E17 | | DQQNEMVRELDGHVL |
| | | | KCVKDQNGSYVVEKC |
| | | | IECVQPQSLQFIIDA |
| | | | FKGQVFALSTHPYGN |
| | | | RVIQRILEHCLPDQT |
| | | | LPILEELHQHTEQLV |
| | | | QDQYGSYVIRHVLEH |
| | | | GRPEDKSKIVAEIRG |
| | | | NVLVLSQHKFASNVV |
| | | | EKCVTHASRTERAVL |
| | | | IDEVCTMNDGPHSAL |
| | | | YTMMKDQYANYVVQK |
| | | | MIDVAEPGQRKIVMH |
| | | | KIRPHIATLRKYTYG |
| | | | KHILAKLEKYYMKNG |
| | | | VDLG |
| | | | (SEQ ID NO: 444) |

[0135] PUF targeting CUG (DM1) with no endonuclease for blocking:

| | | | Target | |
|---|---|---|---|---|
| | Protein | | Se- | Amino Acid |
| Construct | Type | Elements | quence | Sequence |
| A01685 | 8PUF | N- | UGCUGC | GRSRLLEDFRNNRYPN |
| | | terminal | UG (SEQ | LQLREIAGHIMEFSQ |
| | | Rb NLS, | ID NO: | DQHGSRFIELKLERA |
| | | Linker | 453) | TPAERQLVFNEILQA |
| | | between | | AYQLMVDVFGNYVIQ |
| | | NLS | | KFFEFGSLEQKLALA |
| | | and | | ERIRGHVLSLALQMY |
| | | 8PUF | | GSYVIRKALEFIPSD |
| | | | | QQNEMVRELDGHVLK |
| | | | | CVKDQNGSYVVEKCI |
| | | | | ECVQPQSLQFIIDAF |
| | | | | KGQVFALSTHPYGNR |
| | | | | VIQRILEHCLPDQTL |
| | | | | PILEELHQHTEQLVQ |
| | | | | DQYGSYVIRHVLEHG |
| | | | | RPEDKSKIVAEIRGN |
| | | | | VLVLSQHKFASNVVE |
| | | | | KCVTHASRTERAVLI |
| | | | | DEVCTMNDGPHSALY |
| | | | | TMMKDQYANYVVQKM |
| | | | | IDVAEPGQRKIVMHK |
| | | | | IRPHIATLRKYTYGK |
| | | | | HILAKLEKYYMKNGV |
| | | | | DLG (SEQ ID NO: |
| | | | | 444) |

[0136] In some embodiments, an AAV vector of the disclosure comprising a CUG-targeting PUF protein comprises from 5′ to 3′ as set forth in Table A. In some aspects, the AAV vector comprises the nucleic acid sequence set forth in SEQ ID NO: 573 or 574.

TABLE A
PUF-CUG-E17 with Desmin (FL) promoter (A02205)

| Plasmid | |
|---|---|
| Element | Amino Acid Sequences |
| Rb-NLS | DRVLKRSAEGSNPPKPLKKLR |
| | (SEQ ID NO: 543) |
| Linker | GGS |
| 8PUF | GRSRLLEDFRNNRYPNLQLREIAGH |
| | IMEFSQDQHGSRFIELKLERATPAE |
| | RQLVFNEILQAAYQLMVDVFGNYVI |
| | QKFFEFGSLEQKLALAERIRGHVLS |
| | LALOMYGSYVIRKALEFIPSDQQNE |
| | MVRELDGHVLKCVKDQNGSYVVEKC |
| | IECVQPQSLQFIIDAFKGQVFALST |
| | HPYGNRVIQRILEHCLPDQTLPILE |
| | ELHQHTEQLVQDQYGSYVIRHVLEH |
| | GRPEDKSKIVAEIRGNVLVLSQHKF |
| | ASNVVEKCVTHASRTERAVLIDEVC |
| | TMNDGPHSALYTMMKDQYANYVVQK |
| | MIDVAEPGQRKIVMHKIRPHIATLR |
| | KYTYGKHILAKLEKYYMKNGVDLG |
| | (SEQ ID NO: 444) |
| Linker | VDTANGS (SEQ ID NO: 411) |
| E17 | GGGTPKAPNLEPPLPEEEKEGSDLR |
| | PVVIDGSNVAMSHGNKEVFSCRGIL |
| | LAVNWFLERGHTDITVFVPSWRKEQ |
| | PRPDVPITDQHILRELEKKKILVFT |
| | PSRRVGGKRVVCYDDRFIVKLAYES |
| | DGIVVSNDTYRDLQGERQEWKRFIE |
| | ERLLMYSFVNDKFMPPDDPLGRHGP |
| | SLDNFLRKKPLTLE |
| | (SEQ ID NO: 358) |

[0137] In one embodiment, the nucleic acid encoding the PUF(CUG) or PUMBY(CUG) fusion construct or PUF(CUG) or PUMBY(CUG) without an endonuclease is operably linked to a promoter sequence for expression in a cell. In one embodiment, the promoter sequence is a truncated CAG (tCAG) promoter (FIG. 4A). In some embodiments, the promoter sequence comprises an enhancer sequence and/or an intron sequence. In one embodiment, the promoter is a EFS/UBB promoter. In some embodiments, the promoter sequence is a muscle-specific promoter.

[0138] In one embodiment, the nucleic acid encoding the PUF(CUG) (with or without an endonuclease), Cas13d(CUG) or dCas13d(CUG) (dCas13d(CUG) with or without an endonuclease) is operably linked to a promoter sequence for expression in a cell (FIG. 4B-4C and FIG. 12B). In one embodiment, the promoter sequence is an EFS promoter (FIG. 4B-4C). In one embodiment, the promoter is a EFS/UBB promoter (FIG. 12B). In some embodiments, the promoter sequence comprises an enhancer sequence and/or an intron sequence. In some embodiments, the promoter sequence is a muscle-specific promoter (FIG. 12B).

[0139] In some embodiments, the muscle-specific promoter is a desmin promoter as follows:

[0140] Sequences for Muscle specific Desmin promoters:

| | |
|---|---|
| Human Desmin (FL) | taccccctgccccccacagctcctc |
| | tcctgtgccttgtttcccagccatg |
| | cgttctcctctataaatacccgctc |
| | tggtatttggggttggcagctgttg |
| | ctgccagggagatggttgggttgac |
| | atgcggctcctgacaaaacacaaac |
| | ccctggtgtgtgtgggcgtgggtgg |
| | tgtgagtagggggatgaatcaggga |
| | gggggcAggggacccagggggcagg |
| | agccacacaaagtctgtgcgggggg |
| | ggagcgcacatagcaattggaaact |
| | gaaagcttatcagaccctttctgga |
| | aatcagcccactgtttataaacttg |
| | aggccccaccctcgacagtaccggg |
| | gaggaagagggcctgcactagtcca |
| | gagggaaactgaggctcagggcCag |
| | ctcgcccatagacatacatggcagg |
| | caggctttggccaggatccctccgc |
| | ctgccaggcgtctccctgccctccc |
| | ttcctgcctagagacccccaccctc |
| | aagcctggctggtctttgcctgaga |
| | cccaaacctcttcgacttcaagaga |
| | atatttaggaacaaggtggtttagg |
| | gcctttcctgggaacaggccttgac |
| | cctttaagaaatgacccaaagtctc |
| | tccttgaccaaaaaggggaccctca |
| | aactaaagggaagcctctcttctgc |
| | tgtctcccctgaccccactcccccc |
| | caccccaggacgaggagataaccag |
| | ggctgaaagaggcccgcctgggggc |
| | tgcagacatgcttgctgcctgccct |
| | ggcgaaggattggcaggcttgcccg |
| | tcacaggacccccgctggctgactc |
| | aggggcgcaggcctTttgcggggga |
| | gctggcctccccgcccccacggcca |
| | cgggccgccctttcctggcaggaca |
| | gcgggatcttgcagctgtcagggga |
| | ggggaggcgggggctgatgtcagga |
| | gggatacaaatagtgccgacggctg |
| | ggggccctGTCTCCCCTCGCCGCAT |
| | CCACTCTCCGGCCGGCCGCCTGCCC |
| | GCCGCCTCCTCCGTGCGCCCGCCAG |
| | CCTCGCCCG |
| | (SEQ ID NO: 568) |
| Human Truncated | ACCCATGCCTCCTCAGGTACCCCCT |
| Desmin (tDesmin) | GCCCCCCACAGCTCCTCTCCTGTGC |
| | CTTGTTTCCCAGCCATGCGTTCTCC |
| | TCTATAAATACCCGCTCTGGTATTT |
| | GGGGTTGGCAGCTGTTGCTGCCAGG |
| | GAGATGGTTGGGTTGACATGCGGCT |
| | CCTGACAAAACACAAACCCCTGGTG |
| | TGTGTGGGCGTGGGTGGTGTGAGTA |
| | GGGGGATGAATCAGGGAGGGGGCaG |
| | GGGACCCAGGGGGCAGGAGCCACAC |
| | AAAGTCTGTGCGGGGGTGGGAGCGC |
| | ACATAGCAATTGGAAACTGAAAGCT |
| | TATCAGACCCTTTCTGGAAATCAGC |
| | CCACTGTTTATAAACTTGAGGCCCC |
| | ACCCTCGAGATAACCAGGGCTGAAA |
| | GAGGCCCGCCTGGGGGCTGCAGACA |
| | TGCTTGCTGCCTGCCCTGGCGAAGG |
| | ATTGGCAGGCTTGCCCGTCACAGGA |
| | CCCCCGCTGGCTGACTCAGGGGCGC |
| | AGGCCTtTTGCGGGGGAGCTGGCCT |
| | CCCCGCCCCCACGGCCACGGGCCGC |
| | CCTTTCCTGGCAGGACAGCGGGATC |
| | TTGCAGCTGTCAGGGGAGGGGAGGC |
| | GGGGGCTGATGTCAGGAGGGATAtA |
| | AATAGTGCCGACGGCTGGGGGCCCT |
| | GTCTCCCCTCGCCGCATCCACTCTC |
| | CGGCCGGCCGCCTGCCCGCCGCCTC |
| | CTCCGTGCGCCCGCCAGCCTCGCCC |
| | GCGCCGTC |
| | (SEQ ID NO: 569) |

[0141] In another embodiment, the PUF(CUG) or PUMBY(CUG) or Cas13d(CUG) or dCas13d(CUG) configurations are packaged in an AAV vector. In one embodiment, the AAV vector is an AAV9 vector. In another embodiment, the AAV vector is an AAVrh74 vector.

[0142] In another embodiment, the PUF(CUG) or PUMBY(CUG) or Cas13d(CUG) or dCas13d(CUG) configurations are packaged in an AAV vector. In one embodiment, the AAV vector is an AAV9 vector. In another embodiment, the AAV vector is an AAVrh74 vector.

[0143] In some embodiments, an AAV vector of the disclosure comprising a CUG-targeting active Cas13d protein comprises from 5′ to 3′ is set forth in Table B. In some aspects, the AAV vector comprises the nucleic acid sequence set forth in SEQ ID NO: 573 or 574.

TABLE B
CUG-Targeting Cas13d AAV vector

| Plasmid | |
|---|---|
| Element | Amino Acid Sequences |
| 5′ ITR | Cctgcaggcagctgcgcgctcgctc |
| | gctcactgaggccgcccgggcgtcg |
| | ggcgacctttggtcgcccggcctca |
| | gtgagcgagcgagcgcgcagagagg |
| | gagtggccaactccatcactagggg |
| | ttcct (SEQ ID NO: 599) |
| Human U6 | GAGGGCCTATTTCCCATGATTCCTT |
| promoter | CATATTTGCATATACGATACAAGGC |
| | TGTTAGAGAGATAATTAGAATTAAT |
| | TTGACTGTAAACACAAAGATATTAG |
| | TACAAAATACGTGACGTAGAAAGTA |
| | ATAATTTCTTGGGTAGTTTGCAGTT |
| | TTAAAATTATGTTTTAAAATGGACT |
| | ATCATATGCTTACCGTAACTTGAAA |
| | GTATTTCGATTTCTTGGCTTTATAT |
| | ATCTTGTGGAAAGGACGAAACACC |
| | (SEQ ID NO: 519) |
| Seq212 direct | gtacaatagccctgcagtaaggcag |
| repeat (DR) | ggttctaAGAC |
| | (SEQ ID NO: 213) |
| Spacer (CTG | CAGCAGCAGCAGCAGCAGCAGCAGC |
| guide 3) | A (SEQ ID NO: 459) |
| human tdesmin | ACCCATGCCTCCTCAGGTACCCCCT |
| promoter | GCCCCCCACAGCTCCTCTCCTGTGC |
| | CTTGTTTCCCAGCCATGCGTTCTCC |
| | TCTATAAATACCCGCTCTGGTATTT |
| | GGGGTTGGCAGCTGTTGCTGCCAGG |
| | GAGATGGTTGGGTTGACATGCGGCT |
| | CCTGACAAAACACAAACCCCTGGTG |
| | TGTGTGGGCGTGGGTGGTGTGAGTA |
| | GGGGGATGAATCAGGGAGGGGGCaG |
| | GGGACCCAGGGGGCAGGAGCCACAC |
| | AAAGTCTGTGCGGGGGTGGGAGCGC |
| | ACATAGCAATTGGAAACTGAAAGCT |
| | TATCAGACCCTTTCTGGAAATCAGC |
| | CCACTGTTTATAAACTTGAGGCCCC |
| | ACCCTCGAGATAACCAGGGCTGAAA |
| | GAGGCCCGCCTGGGGGCTGCAGACA |
| | TGCTTGCTGCCTGCCCTGGCGAAGG |
| | ATTGGCAGGCTTGCCCGTCACAGGA |
| | CCCCCGCTGGCTGACTCAGGGGCGC |
| | AGGCCTtTTGCGGGGGAGCTGGCCT |
| | CCCCGCCCCCACGGCCACGGGCCGC |
| | CCTTTCCTGGCAGGACAGCGGGATC |
| | TTGCAGCTGTCAGGGGAGGGGAGGC |
| | GGGGGCTGATGTCAGGAGGGATAtA |
| | AATAGTGCCGACGGCTGGGGGCCCT |
| | GTCTCCCCTCGCCGCATCCACTCTC |
| | CGGCCGGCCGCCTGCCCGCCGCCTC |
| | CTCCGTGCGCCCGCCAGCCTCGCCC |
| | GCGCCGTC (SEQ ID NO: 569) |
| Kozak Sequence | GCCGCCACCATG |
| | (SEQ ID NO: 529) |
| Cas13d Seq212 | AAGAAGAAGCACCAGAGCGCC |
| | GCCGAGAAGAGGCAAGTGAAGAAGC |
| | TCAAGAATCAAGAGAAGGCCCAGAA |
| | GTACGCTAGCGAGCCTTCCCCCCTC |
| | CAGAGCGATACAGCTGGCGTGGAAT |
| | GCTCCCAGAAAAAGACAGTCGTCAG |
| | CCACATTGCCAGCTCCAAGACACTG |
| | GCCAAGGCTATGGGACTCAAATCCA |
| | CACTGGTCATGGGCGACAAGCTGGT |
| | CATCACCAGCTTTGCTGCTAGCAAG |
| | GCTGTCGGAGGCGCTGGCTACAAAA |
| | GCGCTAACATTGAAAAAATCACAGA |
| | TCTGCAAGGAAGGGTCATTGAGGAG |
| | CACGAAAGGATGTTTAGCGCCGATG |
| | TCGGAGAGAAAAATATCGAACTGAG |
| | CAAGAATGACTGCCACACCAACGTC |
| | AACAACCCCGTGGTGACCAACATCG |
| | GAAAGGATTACATCGGACTGAAATC |
| | TAGGCTGGAGCAAGAGTTTTTCGGC |
| | AAGACATTCGAGAATGACAATCTGC |
| | ATGTGCAGCTGGCCTACAATATCCT |
| | CGACATCAAGAAAATTCTGGGAACC |
| | TATGTGAACAATATCATTTATATCT |
| | TCTACAATCTGAATAGGGCTGGCAC |
| | CGGCAGAGATGAGAGGATGTATGAC |
| | GACCTCATCGGCACACTGTACGCTT |
| | ACAAACCCATGGAGGCTCAACAGAC |
| | CTATCTGCTCAAAGGCGACAAGGAT |
| | ATGAGGAGGTTTGAGGAGGTGAAAC |
| | AGCTGCTGCAAAACACCTCCGCTTA |
| | CTATGTGTATTACGGCACACTGTTC |
| | GAGAAGGTGAAGGCTAAGAGCAAGA |
| | AGGAACAGAGGGCTAAGGAGGCCGA |
| | AATCGACGCTTGTACCGCCCATAAC |
| | TACGATGTGCTGAGACTGCTGTCCC |
| | TCATGAGGCAGCTGTGCATGCACTC |
| | CGTCGCTGGAACAGCCTTTAAGCTG |
| | GCTGAGTCCGCTCTGTTCAACATTG |
| | AGGATGTGCTCAGCGCCGATCTGAA |
| | GGAAATCCTCGATGAAGCCTTCTCC |
| | GGCGCCGTGAACAAGCTCAATGACG |
| | GATTCGTGCAGCACTCCGGCAACAA |
| | TCTGTACGTGCTCCAGCAGCTGTAC |
| | CCTAATGAGACCATCGAGAGAATCG |
| | CCGAGAAGTACTACAGACTCACCGT |
| | GAGGAAGGAGGATCTGAACATGGGA |
| | GTCAACATTAAAAAGCTGAGGGAGC |
| | TGATCGTGGGCCAATACTTTCCCGA |
| | GGTCCTCGACAAAGAATACGACCTC |
| | TCCAAGAATGGAGACAGCGTGGTGA |
| | CATACAGAAGCAAGATTTATACCGT |
| | GATGAATTACATTCTGCTGTATTAC |
| | CTCGAGGACCACGACTCCAGCAGAG |
| | AAAGCATGGTCGAAGCTCTGAGACA |
| | AAACAGAGAGGGCGATGAAGGCAAG |
| | GAGGAGATCTATAGACAGTTTGCCA |
| | AGAAGGTGTGGAACGGCGTGTCCGG |
| | ACTGTTTGGCGTGTGTCTGAACCTC |
| | TTCAAGACCGAAAAGAGAAACAAGT |
| | TTAGGAGCAAAGTCGCCCTCCCCGA |
| | TGTGTCCGGCGCTGCCTATATGCTC |
| | TCCTCCGAGAACATCGACTACTTTG |
| | TCAAGATGCTCTTCTTTGTGTGTAA |
| | GTTTCTGGATGGCAAAGAAATCAAC |
| | GAGCTGCTGTGCGCTCTGATCAACA |
| | AATTTGATAATATTGCCGATATTCT |
| | GGATGCTGCCGCTCAATGTGGCTCC |
| | TCCGTCTGGTTCGTGGACAGCTATA |
| | GGTTCTTCGAGAGATCTAGGAGGAT |
| | TAGCGCCCAGATTAGAATCGTGAAG |
| | AACATCGCTTCCAAGGATTTTAAGA |
| | AATCCAAGAAGGATTCCGATGAGAG |
| | CTACCCCGAGCAGCTGTATCTGGAT |
| | GCTCTGGCTCTGCTCGGAGACGTCA |
| | TCTCCAAGTACAAGCAGAATAGAGA |
| | TGGCAGCGTCGTCATCGATGACCAA |
| | GGCAATGCCGTGCTGACAGAGCAAT |
| | ACAAGAGGTTTAGATATGAATTTTT |
| | CGAGGAGATCAAGAGGGACGAAAGC |
| | GGCGGCATCAAGTACAAGAAGTCCG |
| | GAAAACCCGAGTACAACCATCAGAG |
| | AAGGAATTTTATTCTGAATAATGTG |
| | CTGAAAAGCAAATGGTTTTTCTATG |
| | TGGTGAAGTACAATAGGCCCAGCAG |
| | CTGCAGAGAACTGATGAAGAATAAG |
| | GAAATTCTGAGGTTCGTGCTGAGAG |
| | ACATCCCCGACTCCCAAGTGAGAAG |
| | ATACTTTAAGGCCGTCCAAGGAGAG |
| | GAAGCTTACGCTAGCGCCGAAGCTA |
| | TGAGGACAAGACTGGTCGACGCTCT |
| | GTCCCAATTTAGCGTCACAGCTTGT |
| | CTGGATGAAGTGGGCGGCATGACAG |
| | ACAAGGAATTCGCCTCCCAGAGGGC |
| | CGTCGATAGCAAAGAAAAACTGAGA |
| | GCCATCATCAGACTGTATCTGACAG |
| | TCGCCTATCTGATTACCAAGAGCAT |
| | GGTGAAGGTGAATACAAGGTTTAGC |
| | ATTGCCTTTAGCGTGCTGGAGAGGG |
| | ACTACTATCTGCTCATTGACGGCAA |
| | GAAGAAATCCAGCGACTACACCGGA |
| | GAGGATATGCTGGCTCTGACCAGAA |
| | AATTTGTGGGCGAAGATGCTGGACT |
| | GTATAGAGAGTGGAAAGAGAAGAAC |
| | GCTGAAGCCAAGGACAAATATTTTG |
| | ACAAGGCCGAAAGGAAGAAGGTGCT |
| | GAGACAGAACGATAAGATGATCAGA |
| | AAGATGCACTTCACACCCCACTCCC |
| | TCAATTACGTCCAAAAGAATCTCGA |
| | AAGCGTCCAGAGCAACGGACTGGCC |
| | GCCGTCATCAAGGAATATAGAAATG |
| | CCGTCGCTCACCTCAATATCATCAA |
| | TAGACTGGACGAGTACATTGGCTCC |
| | GCTAGGGCTGATAGCTACTACTCTC |
| | TGTACTGTTACTGCCTCCAAATGTA |
| | TCTGAGCAAGAACTTCAGCGTGGGC |
| | TACCTCATCAACGTGCAAAAGCAGC |
| | TGGAGGAGCACCACACCTACATGAA |
| | GGATCTCATGTGGCTGCTCAACATC |
| | CCCTTCGCTTACAACCTCGCCAGAT |
| | ACAAAAATCTGTCCAACGAAAAACT |
| | CTTTTACGACGAGGAAGCCGCCGCC |
| | GAAAAGGCTGACAAGGCTGAGAACG |
| | AGAGAGGCGAA |
| | (SEQ ID NO: 601) |
| Linker | GGAAGC |
| SV-40 NLS | CCCAAGAAGAAAAGGAAGGTC |
| | (SEQ ID NO: 532) |
| Linker | GGCGGAtct |
| Myc Tag | GAGCAgAAACTGATTAGcGAAGAgG |
| | ATCTC (SEQ ID NO: 602) |
| WPRE3 | GATAATCAACCTCTGGATTACAAAA |
| | TTTGTGAAAGATTGACTGGTATTCT |
| | TAACTATGTTGCTCCTTTTACGCTA |
| | TGTGGATACGCTGCTTTAATGCCTT |
| | TGTATCATGCTATTGCTTCCCGTAT |
| | GGCTTTCATTTTCTCCTCCTTGTAT |
| | AAATCCTGGTTAGTTCTTGCCACGG |
| | CGGAACTCATCGCCGCCTGCCTTGC |
| | CCGCTGCTGGACAGGGGCTCGGCTG |
| | TTGGGCACTGACAATTCCGTGG |
| | (SEQ ID NO: 603) |
| SV-40 poly A | AACTTGTTTATTGCAGCTTATAATG |
| | GTTACAAATAAAGCAATAGCATCAC |
| | AAATTTCACAAATAAAGCATTTTTT |
| | TCACTGCATTCTAGTTGTGGTTTGT |
| | CCAAACTCATCAATGTATCTTA |
| | (SEQ ID NO: 533) |
| 3′ITR | Aggaacccctagtgatggagttggc |
| | cactccctctctgcgcgctcgctcg |
| | ctcactgaggccgggcgaccaaagg |
| | tcgcccgacgcccgggctttgcccg |
| | ggcggcctcagtgagcgagcgagcg |
| | cgcagctgcctgcagg |
| | (SEQ ID NO: 600) |

[0144] In some embodiments, an AAV vector of the disclosure, referred to as A02205, comprising a CUG-targeting PUF protein fused to an endonuclease comprises from 5′ to 3′ the elements as set forth in Table C. In some aspects, the AAV vector comprises the nucleic acid sequence set forth in SEQ ID NO: 574 or 575.

TABLE C
Exemplary CUG-Targeting PUF-endonuclease AAV vector A02205

| Plasmid | |
|---|---|
| Element | Amino Acid Sequences |
| 5′ITR | CCTGCAGGCAGCTGCGCGCTCGCTCGCTCACTGAGGCCGCCCGGG |
| | CGTCGGGCGACCTTTGGTCGCCCGGCCTCAGTGAGCGAGCGAGCG |
| | CGCAGAGAGGGAGTGGCCAACTCCATCACTAGGGGTTCCT (SEQ ID |
| | NO: 599) |
| Human | taccccctgccccccacagctcctctcctgtgccttgtttcccagccatgcgttctcctctataaatacccgctctg |
| Desmin | gtatttggggttggcagctgttgctgccagggagatggttgggttgacatgcggctcctgacaaaacacaaacc |
| Promoter | cctggtgtgtgtgggcgtgggtggtgtgagtagggggatgaatcagggagggggcAggggacccagggg |
| (FL) | gcaggagccacacaaagtctgtgcggggggggagcgcacatagcaattggaaactgaaagcttatcagac |
| | cctttctggaaatcagcccactgtttataaacttgaggccccaccctcgacagtaccggggaggaagagggcc |
| | tgcactagtccagagggaaactgaggctcagggcCagctcgcccatagacatacatggcaggcaggctttg |
| | gccaggatccctccgcctgccaggcgtctccctgccctcccttcctgcctagagacccccaccctcaagcctg |
| | gctggtctttgcctgagacccaaacctcttcgacttcaagagaatatttaggaacaaggtggtttagggcctttcc |
| | tgggaacaggccttgaccctttaagaaatgacccaaagtctctccttgaccaaaaaggggaccctcaaactaaa |
| | gggaagcctctcttctgctgtctcccctgaccccactcccccccaccccaggacgaggagataaccagggct |
| | gaaagaggcccgcctgggggctgcagacatgcttgctgcctgccctggcgaaggattggcaggcttgcccg |
| | tcacaggacccccgctggctgactcaggggcgcaggcctTttgcgggggagctggcctccccgcccccac |
| | ggccacgggccgccctttcctggcaggacagcgggatcttgcagctgtcaggggaggggaggcgggggct |
| | gatgtcaggagggatacaaatagtgccgacggctgggggccctGTCTCCCCTCGCCGCATC |
| | CACTCTCCGGCCGGCCGCCTGCCCGCCGCCTCCTCCGTGCGCCCGC |
| | CAGCCTCGCCCG (SEQ ID NO: 608) |
| Kozak | gccgccACCatg (SEQ ID NO: 529) |
| Rb-NLS | Gaccgtgtgctcaaaagaagtgctgaaggaagcaaccctcctaaaccactgaaaaaactacgc (SEQ ID NO: |
| | 604) |
| Linker | ggaGGATCG |
| 8PUF | GGACGAAGCCGACTCTTGGAAGACTTCAGAAACAATCGGTATCCG |
| | AACCTTCAGCTGAGAGAAATTGCTGGTCACATCATGGAATTTTCTC |
| | AAGATCAACATGGAAGCCGGTTTATTGAACTTAAACTCGAACGAG |
| | CCACCCCGGCCGAAAGGCAATTGGTGTTCAATGAAATTCTTCAGG |
| | CCGCATACCAACTCATGGTTGATGTTTTTGGGAACTATGTTATTCA |
| | AAAGTTTTTTGAGTTCGGGTCACTGGAGCAAAAGTTGGCATTGGC |
| | AGAGCGAATCCGGGGCCATGTTCTGAGCCTCGCTCTCCAAATGTA |
| | CGGTAGTTATGTCATTCGCAAAGCACTCGAGTTCATACCATCAGAT |
| | CAACAGAATGAGATGGTGCGGGAGCTGGATGGGCATGTTTTGAAA |
| | TGCGTGAAAGACCAAAACGGTAGCTACGTAGTTGAGAAATGCATC |
| | GAATGCGTCCAACCACAGTCTCTCCAATTTATTATAGATGCATTTA |
| | AGGGTCAGGTTTTCGCGCTTTCTACGCACCCGTATGGGAACCGAGT |
| | GATTCAGAGAATCTTGGAGCACTGCCTGCCGGATCAGACACTCCC |
| | TATCTTGGAGGAATTGCACCAGCATACCGAACAATTGGTGCAAGA |
| | TCAATACGGTTCATATGTTATTCGGCACGTTCTTGAGCATGGAAGG |
| | CCAGAGGACAAGTCAAAGATCGTCGCTGAGATTAGAGGTAACGTA |
| | TTGGTGCTCTCACAACACAAATTTGCATCTAATGTGGTGGAGAAAT |
| | GTGTTACTCATGCTTCTAGAACGGAAAGGGCAGTTCTCATAGACG |
| | AAGTTTGCACAATGAATGATGGTCCTCATAGCGCACTTTATACCAT |
| | GATGAAGGACCAGTATGCAAACTATGTCGTCCAGAAAATGATCGA |
| | TGTGGCGGAGCCCGGTCAACGGAAAATCGTGATGCACAAAATCCG |
| | ACCTCACATTGCTACACTCAGAAAATACACGTATGGAAAACATAT |
| | TCTGGCTAAGCTGGAGAAATATTACATGAAGAATGGAGTGGATCT |
| | GGGG (SEQ ID NO: 452) |
| Linker | GTGGATACTGCCAATGGCAGC (SEQ ID NO: 605) |
| E17 | Ggtggtggcacccctaaggctcccaacctggagcctccactcccagaagaggaaaaggagggcagcgac |
| | ctgagaccagtggtcatcgatgggagcaacgtggccatgagccatgggaacaaggaggtcttctcctgccgg |
| | ggcatcctgctggcagtgaactggtttctggagcggggccacacagacatcacagtgtttgtgccatcctgga |
| | ggaaggagcagcctcggcccgacgtgcccatcacagaccagcacatcctgcgggaactggagaagaaga |
| | agatcctggtgttcacaccatcacgacgcgtgggtggcaagcgggtggtgtgctatgacgacagattcattgtg |
| | aagctggcctacgagtctgacgggatcgtggtttccaacgacacataccgtgacctccaaggcgagcggcag |
| | gagtggaagcgcttcatcgaggagcggctgctcatgtactccttcgtcaatgacaagtttatgccccctgatgac |
| | ccactgggccggcacgggcccagcctggacaacttcctgcgtaagaagccactcactttggag (SEQ ID |
| | NO: 606) |
| WPRE | Aatcaacctctggattacaaaatttgtgaaagattgactggtattcttaactatgttgctccttttacgctatgtggat |
| | acgctgctttaatgcctttgtatcatgctattgcttcccgtatggctttcattttctcctccttgtataaatcctggtt |
| | gctgtctctttatgaggagttgtggcccgttgtcaggcaacgtggcgtggtgtgcactgtgtttgctgacgcaacccc |
| | cactggttggggcattgccaccacctgtcagctcctttccgggactttcgctttccccctccctattgccacggcg |
| | gaactcatcgccgcctgccttgcccgctgctggacaggggctcggctgttgggcactgacaattccgtggtgtt |
| | gtcggggaaatcatcgtcctttccttggctgctcgcctgtgttgccacctggattctgcgcgggacgtccttctgc |
| | tacgtcccttcggccctcaatccagcggaccttccttcccgcggcctgctgccggctctgcggcctcttccgcg |
| | tcttcgccttcgccctcagacgagtcggatctccctttgggccgcctccccgc (SEQ ID NO: 607) |
| SV-40 | AACTTGTTTATTGCAGCTTATAATGGTTACAAATAAAGCAATAGCA |
| poly A | TCACAAATTTCACAAATAAAGCATTTTTTTCACTGCATTCTAGTTG |
| | TGGTTTGTCCAAACTCATCAATGTATCTTA (SEQ ID NO: 533) |
| 3′ITR | AGGAACCCCTAGTGATGGAGTTGGCCACTCCCTCTCTGCGCGCTCG |
| | CTCGCTCACTGAGGCCGGGCGACCAAAGGTCGCCCGACGCCCGGG |
| | CTTTGCCCGGGCGGCCTCAGTGAGCGAGCGAGCGCGCAGCTGCCT |
| | GCAGG (SEQ ID NO: 600) |

PUF-CUG No Endonuclease with Desmin (FL) Promoter (A02239)

[0145] In some embodiments, the disclosure provides a CUG-targeting PUF protein fused to an RB NLS as set forth in Table D.

TABLE D
Exemplary CUG-Targeting 8PUF

| Plasmid | |
|---|---|
| Element | Amino Acid Sequences |
| Rb-NLS | DRVLKRSAEGSNPPKPLKKLR (SEQ ID NO: 543) |
| Linker | GGS |
| 8PUF | GRSRLLEDFRNNRYPNLQLREIAGHIMEFSQDQHGSRFIELKLERATPAERQL |
| | VFNEILQAAYQLMVDVFGNYVIQKFFEFGSLEQKLALAERIRGHVLSLALOM |
| | YGSYVIRKALEFIPSDQQNEMVRELDGHVLKCVKDQNGSYVVEKCIECVQP |
| | QSLQFIIDAFKGQVFALSTHPYGNRVIQRILEHCLPDQTLPILEELHQHTEQLV |
| | QDQYGSYVIRHVLEHGRPEDKSKIVAEIRGNVLVLSQHKFASNVVEKCVTH |
| | ASRTERAVLIDEVCTMNDGPHSALYTMMKDQYANYVVQKMIDVAEPGQR |
| | KIVMHKIRPHIATLRKYTYGKHILAKLEKYYMKNGVDLG (SEQ ID NO: 444) |

[0146] In some embodiments, an AAV vector of the disclosure, referred to as A02239, comprising a CUG-targeting PUF protein comprises from 5′ to 3′ the elements as set forth in Table E. In some aspects, the AAV vector comprises the nucleic acid sequence set forth in SEQ ID NO: 576 or 577.

TABLE E
Exemplary CUG-Targeting PUF AAV vector A02239

| Plasmid | |
|---|---|
| Element | Amino Acid Sequences |
| 5′ITR | CCTGCAGGCAGCTGCGCGCTCGCTCGCTCACTGAGGCCGCCCGGG |
| | CGTCGGGCGACCTTTGGTCGCCCGGCCTCAGTGAGCGAGCGAGCG |
| | CGCAGAGAGGGAGTGGCCAACTCCATCACTAGGGGTTCCT (SEQ ID |
| | NO: 599) |
| Human | taccccctgccccccacagctcctctcctgtgccttgtttcccagccatgogttctcctctataaatacccgctctg |
| Desmin | gtatttggggttggcagctgttgctgccagggagatggttgggttgacatgcggctcctgacaaaacacaaacc |
| Promoter | cctggtgtgtgtgggcgtgggtggtgtgagtagggggatgaatcagggagggggcAggggacccagggg |
| (FL) | gcaggagccacacaaagtctgtgcggggggggagcgcacatagcaattggaaactgaaagcttatcagac |
| | cctttctggaaatcagcccactgtttataaacttgaggccccaccctcgacagtaccggggaggaagagggcc |
| | tgcactagtccagagggaaactgaggctcagggcCagctcgcccatagacatacatggcaggcaggctttg |
| | gccaggatccctccgcctgccaggcgtctccctgccctcccttcctgcctagagacccccaccctcaagcctg |
| | gctggtctttgcctgagacccaaacctcttcgacttcaagagaatatttaggaacaaggtggtttagggcctttcc |
| | tgggaacaggccttgaccctttaagaaatgacccaaagtctctccttgaccaaaaaggggaccctcaaactaaa |
| | gggaagcctctcttctgctgtctcccctgaccccactcccccccaccccaggacgaggagataaccagggct |
| | gaaagaggcccgcctgggggctgcagacatgcttgctgcctgccctggcgaaggattggcaggcttgcccg |
| | tcacaggacccccgctggctgactcaggggcgcaggcctTttgcgggggagctggcctccccgcccccac |
| | ggccacgggccgccctttcctggcaggacagcgggatcttgcagctgtcaggggggggaggcgggggct |
| | gatgtcaggagggatacaaatagtgccgacggctgggggccctGTCTCCCCTCGCCGCATC |
| | CACTCTCCGGCCGGCCGCCTGCCCGCCGCCTCCTCCGTGCGCCCGC |
| | CAGCCTCGCCCG (SEQ ID NO: 608) |
| Kozak | gccgccACCatg (SEQ ID NO: 529) |
| Rb-NLS | Gaccgtgtgctcaaaagaagtgctgaaggaagcaaccctcctaaaccactgaaaaaactacgc (SEQ ID NO: |
| | 604) |
| Linker | ggaGGATCG |
| 8PUF | GGACGAAGCCGACTCTTGGAAGACTTCAGAAACAATCGGTATCCG |
| | AACCTTCAGCTGAGAGAAATTGCTGGTCACATCATGGAATTTTCTC |
| | AAGATCAACATGGAAGCCGGTTTATTGAACTTAAACTCGAACGAG |
| | CCACCCCGGCCGAAAGGCAATTGGTGTTCAATGAAATTCTTCAGG |
| | CCGCATACCAACTCATGGTTGATGTTTTTGGGAACTATGTTATTCA |
| | AAAGTTTTTTGAGTTCGGGTCACTGGAGCAAAAGTTGGCATTGGC |
| | AGAGCGAATCCGGGGCCATGTTCTGAGCCTCGCTCTCCAAATGTA |
| | CGGTAGTTATGTCATTCGCAAAGCACTCGAGTTCATACCATCAGAT |
| | CAACAGAATGAGATGGTGCGGGAGCTGGATGGGCATGTTTTGAAA |
| | TGCGTGAAAGACCAAAACGGTAGCTACGTAGTTGAGAAATGCATC |
| | GAATGCGTCCAACCACAGTCTCTCCAATTTATTATAGATGCATTTA |
| | AGGGTCAGGTTTTCGCGCTTTCTACGCACCCGTATGGGAACCGAGT |
| | GATTCAGAGAATCTTGGAGCACTGCCTGCCGGATCAGACACTCCC |
| | TATCTTGGAGGAATTGCACCAGCATACCGAACAATTGGTGCAAGA |
| | TCAATACGGTTCATATGTTATTCGGCACGTTCTTGAGCATGGAAGG |
| | CCAGAGGACAAGTCAAAGATCGTCGCTGAGATTAGAGGTAACGTA |
| | TTGGTGCTCTCACAACACAAATTTGCATCTAATGTGGTGGAGAAAT |
| | GTGTTACTCATGCTTCTAGAACGGAAAGGGCAGTTCTCATAGACG |
| | AAGTTTGCACAATGAATGATGGTCCTCATAGCGCACTTTATACCAT |
| | GATGAAGGACCAGTATGCAAACTATGTCGTCCAGAAAATGATCGA |
| | TGTGGCGGAGCCCGGTCAACGGAAAATCGTGATGCACAAAATCCG |
| | ACCTCACATTGCTACACTCAGAAAATACACGTATGGAAAACATAT |
| | TCTGGCTAAGCTGGAGAAATATTACATGAAGAATGGAGTGGATCT |
| | GGGG (SEQ ID NO: 452) |
| WPRE | Aatcaacctctggattacaaaatttgtgaaagattgactggtattcttaactatgttgctccttttacgctatgtggat |
| | acgctgctttaatgcctttgtatcatgctattgcttcccgtatggctttcattttctcctccttgtataaatcctggtt |
| | gctgtctctttatgaggagttgtggcccgttgtcaggcaacgtggcgtggtgtgcactgtgtttgctgacgcaacccc |
| | cactggttggggcattgccaccacctgtcagctcctttccgggactttcgctttccccctccctattgccacggcg |
| | gaactcatcgccgcctgccttgcccgctgctggacaggggctcggctgttgggcactgacaattccgtggtgtt |
| | gtcggggaaatcatcgtcctttccttggctgctcgcctgtgttgccacctggattctgcgcgggacgtccttctgc |
| | tacgtcccttcggccctcaatccagcggaccttccttcccgcggcctgctgccggctctgcggcctcttccgcg |
| | tcttcgccttcgccctcagacgagtcggatctccctttgggccgcctccccgc (SEQ ID NO: 607) |
| SV-40 | AACTTGTTTATTGCAGCTTATAATGGTTACAAATAAAGCAATAGCA |
| poly A | TCACAAATTTCACAAATAAAGCATTTTTTTCACTGCATTCTAGTTG |
| | TGGTTTGTCCAAACTCATCAATGTATCTTA (SEQ ID NO: 533) |
| 3′ITR | AGGAACCCCTAGTGATGGAGTTGGCCACTCCCTCTCTGCGCGCTCG |
| | CTCGCTCACTGAGGCCGGGCGACCAAAGGTCGCCCGACGCCCGGG |
| | CTTTGCCCGGGCGGCCTCAGTGAGCGAGCGAGCGCGCAGCTGCCT |
| | GCAGG (SEQ ID NO: 600) |

### Exemplary Blocking RNA-Targeting Compositions

[0147] CTG microsatellite expansions in the non-coding 3′ untranslated region of DMPK cause DM1. Expanded CUG (CUG^{exp}) repeats in DMPK mRNA directly sequester MBNL proteins causing loss of their function. MBNL loss of function is directly responsible for alternative splicing defects and clinical manifestations observed in DM1. PUF(CUG) or dCas13d(CUG) will bind CUG^{exp} RNA directly and block MBNL sequestration to preserve near normal free MBNL levels and function that will reverse DM1 disease phenotypes such as splicing dysfunction, myotonia and others. The following PUF(CUG) and dCas13d(CUG) RNA-targeting constructs are exemplary embodiments for blocking.

[0148] In some embodiments, the disclosure provides a CUG-targeting PUF protein fused to an RB NLS as set forth in Table F.

TABLE F
Exemplary CUG-Targeting 8PUF for blocking CUG RNA

| Plasmid Element | Amino Acid Sequences |
|---|---|
| Rb-NLS | DRVLKRSAEGSNPPKPLKKLR (SEQ ID NO: 543) |
| Linker | GGS |
| 8PUF | GRSRLLEDFRNNRYPNLQLREIAGHIMEFSQDQHGSRFIELKL |
| | ERATPAERQLVFNEILQAAYQLMVDVFGNYVIQKFFEFGSLE |
| | QKLALAERIRGHVLSLALQMYGSYVIRKALEFIPSDQQNEMV |
| | RELDGHVLKCVKDQNGSYVVEKCIECVQPQSLQFIIDAFKGQ |
| | VFALSTHPYGNRVIQRILEHCLPDQTLPILEELHQHTEQLVQD |
| | QYGSYVIRHVLEHGRPEDKSKIVAEIRGNVLVLSQHKFASNV |
| | VEKCVTHASRTERAVLIDEVCTMNDGPHSALYTMMKDQYA |
| | NYVVQKMIDVAEPGQRKIVMHKIRPHIATLRKYTYGKHILA |
| | KLEKYYMKNGVDLG (SEQ ID NO: 444) |

[0149] In some embodiments, an AAV vector of the disclosure comprising a CUG-targeting PUF protein suitable for blocking comprises from 5′ to 3′ the elements as set forth in Table G. In some aspects, the AAV vector comprises the nucleic acid sequence set forth in SEQ ID NO: 578 or 579.

TABLE G
Exemplary CUG-Targeting blocking PUF
Nucleotide sequences of elements in order N-terminal to C-terminal

| Plasmid Element | Amino Acid Sequences |
|---|---|
| 5′ITR | CCTGCAGGCAGCTGCGCGCTCGCTCGCTCACTGAGG |
| | CCGCCCGGGCGTCGGGCGACCTTTGGTCGCCCGGCCT |
| | CAGTGAGCGAGCGAGCGCGCAGAGAGGGAGTGGCC |
| | AACTCCATCACTAGGGGTTCCT (SEQ ID NO: 599) |
| EFS/UBB Promoter | GGGCAGAGCGCACATCGCCCACAGTCCCCGAGAAGT |
| | TGGGGGGAGGGGTCGGCAATTGAaCCGGTGCCTAGA |
| | GAAGGTGGCGCGGGGTAAACTGGGAAAGTGATGTCG |
| | TGTACTGGCTCCGCCTTTTTCCCGAGGGTGGGGGAGA |
| | ACCGTATATAAGTGCAGTAGTCGCCGTGAACGTTCTT |
| | TTTCGCAACGGGTTTGCCGCCAGAACACAGaattccagGT |
| | AAGTCCCGCAGCCGTAACGACCTTGGGGGGGTGTGA |
| | GATTCTCATTCTAATTTTGAAGAATATTAGGTGTAAA |
| | AGCAAGAAATACAATGATCCTGAGGTGACACGCTTA |
| | TGTTTTACTTTTAAACTAGGT (SEQ ID NO: 609) |
| Kozak | gccgccACCatg (SEQ ID NO: 529) |
| Rb-NLS | Gaccgtgtgctcaaaagaagtgctgaaggaagcaaccctcctaaaccactgaaaaaactacgc |
| | (SEQ ID NO: 604) |
| Linker | ggaGGATCG |
| 8PUF | GGACGAAGCCGACTCTTGGAAGACTTCAGAAACAAT |
| | CGGTATCCGAACCTTCAGCTGAGAGAAATTGCTGGT |
| | CACATCATGGAATTTTCTCAAGATCAACATGGAAGC |
| | CGGTTTATTGAACTTAAACTCGAACGAGCCACCCCG |
| | GCCGAAAGGCAATTGGTGTTCAATGAAATTCTTCAG |
| | GCCGCATACCAACTCATGGTTGATGTTTTTGGGAACT |
| | ATGTTATTCAAAAGTTTTTTGAGTTCGGGTCACTGGA |
| | GCAAAAGTTGGCATTGGCAGAGCGAATCCGGGGCCA |
| | TGTTCTGAGCCTCGCTCTCCAAATGTACGGTAGTTAT |
| | GTCATTCGCAAAGCACTCGAGTTCATACCATCAGATC |
| | AACAGAATGAGATGGTGCGGGAGCTGGATGGGCATG |
| | TTTTGAAATGCGTGAAAGACCAAAACGGTAGCTACG |
| | TAGTTGAGAAATGCATCGAATGCGTCCAACCACAGT |
| | CTCTCCAATTTATTATAGATGCATTTAAGGGTCAGGT |
| | TTTCGCGCTTTCTACGCACCCGTATGGGAACCGAGTG |
| | ATTCAGAGAATCTTGGAGCACTGCCTGCCGGATCAG |
| | ACACTCCCTATCTTGGAGGAATTGCACCAGCATACCG |
| | AACAATTGGTGCAAGATCAATACGGTTCATATGTTAT |
| | TCGGCACGTTCTTGAGCATGGAAGGCCAGAGGACAA |
| | GTCAAAGATCGTCGCTGAGATTAGAGGTAACGTATT |
| | GGTGCTCTCACAACACAAATTTGCATCTAATGTGGTG |
| | GAGAAATGTGTTACTCATGCTTCTAGAACGGAAAGG |
| | GCAGTTCTCATAGACGAAGTTTGCACAATGAATGAT |
| | GGTCCTCATAGCGCACTTTATACCATGATGAAGGACC |
| | AGTATGCAAACTATGTCGTCCAGAAAATGATCGATG |
| | TGGCGGAGCCCGGTCAACGGAAAATCGTGATGCACA |
| | AAATCCGACCTCACATTGCTACACTCAGAAAATACA |
| | CGTATGGAAAACATATTCTGGCTAAGCTGGAGAAAT |
| | ATTACATGAAGAATGGAGTGGATCTGGGG (SEQ ID NO: |
| | 452) |
| WPRE | Aatcaacctctggattacaaaatttgtgaaagattgactggtattcttaactatgttgctcct |
| | tttacgctatgtggatacgctgctttaatgcctttgtatcatgctattgcttcccgtatggcttt |
| | cattttctcctccttgtataaatcctggttgctgtctctttatgaggagttgtggcccgttgtca |
| | ggcaacgtggcgtggtgtgcactgtgtttgctgacgcaacccccactggttggggcatt |
| | gccaccacctgtcagctcctttccgggactttcgctttccccctccctattgccacggcgg |
| | aactcatcgccgcctgccttgcccgctgctggacaggggctcggctgttgggcactga |
| | caattccgtggtgttgtcggggaaatcatcgtcctttccttggctgctcgcctgtgttgcca |
| | cctggattctgcgcgggacgtccttctgctacgtcccttcggccctcaatccagcggacc |
| | ttccttcccgcggcctgctgccggctctgcggcctcttccgcgtcttcgccttcgccctca |
| | gacgagtcggatctccctttgggccgcctccccgc (SEQ ID NO: 607) |
| SV-40 poly A | AACTTGTTTATTGCAGCTTATAATGGTTACAAATAAA |
| | GCAATAGCATCACAAATTTCACAAATAAAGCATTTTT |
| | TTCACTGCATTCTAGTTGTGGTTTGTCCAAACTCATC |
| | AATGTATCTTA (SEQ ID NO: 533) |
| 3′ITR | AGGAACCCCTAGTGATGGAGTTGGCCACTCCCTCTCT |
| | GCGCGCTCGCTCGCTCACTGAGGCCGGGCGACCAAA |
| | GGTCGCCCGACGCCCGGGCTTTGCCCGGGCGGCCTC |
| | AGTGAGCGAGCGAGCGCGCAGCTGCCTGCAGG (SEQ ID |
| | NO: 600) |

PUF Targeting CUG (DM1) No Endonuclease with Myc Tag

[0150] In some embodiments, the disclosure provides a CUG-targeting PUF protein fused to an RB NLS as set forth in Table H.

TABLE H
Exemplary CUG-Targeting 8PUF for blocking CUG RNA

| Plasmid Element | Amino Acid Sequences |
|---|---|
| Rb-NLS | DRVLKRSAEGSNPPKPLKKLR (SEQ ID NO: 543) |
| Linker | GGS |
| 8PUF | GRSRLLEDFRNNRYPNLQLREIAGHIMEFSQDQHGSRFIELKL |
| | ERATPAERQLVFNEILQAAYQLMVDVFGNYVIQKFFEFGSLE |
| | QKLALAERIRGHVLSLALQMYGSYVIRKALEFIPSDQQNEMV |
| | RELDGHVLKCVKDQNGSYVVEKCIECVQPQSLQFIIDAFKGQ |
| | VFALSTHPYGNRVIQRILEHCLPDQTLPILEELHQHTEQLVQD |
| | QYGSYVIRHVLEHGRPEDKSKIVAEIRGNVLVLSQHKFASNV |
| | VEKCVTHASRTERAVLIDEVCTMNDGPHSALYTMMKDQYA |
| | NYVVQKMIDVAEPGQRKIVMHKIRPHIATLRKYTYGKHILA |
| | KLEKYYMKNGVDLG (SEQ ID NO: 444) |
| Linker | GGS |
| Myc tag | EQKLISEEDL (SEQ ID NO: 610) |

[0151] In some embodiments, an AAV vector of the disclosure comprising a CUG-targeting PUF protein suitable for blocking comprises from 5′ to 3′ the elements as set forth in Table I. In some aspects, the AAV vector comprises the nucleic acid sequence set forth in SEQ ID NO: 581 or 582.

TABLE I
Exemplary AAV vector comprising a CUG-Targeting blocking PUF

| Plasmid Element | Amino Acid Sequences |
|---|---|
| 5′ITR | CCTGCAGGCAGCTGCGCGCTCGCTCGCTCACTGAGG |
| | CCGCCCGGGCGTCGGGCGACCTTTGGTCGCCCGGCCT |
| | CAGTGAGCGAGCGAGCGCGCAGAGAGGGAGTGGCC |
| | AACTCCATCACTAGGGGTTCCT (SEQ ID NO: 599) |
| EFS/UBB Promoter | GGGCAGAGCGCACATCGCCCACAGTCCCCGAGAAGT |
| | TGGGGGGAGGGGTCGGCAATTGAaCCGGTGCCTAGA |
| | GAAGGTGGCGCGGGGTAAACTGGGAAAGTGATGTCG |
| | TGTACTGGCTCCGCCTTTTTCCCGAGGGTGGGGGAGA |
| | ACCGTATATAAGTGCAGTAGTCGCCGTGAACGTTCTT |
| | TTTCGCAACGGGTTTGCCGCCAGAACACAGaattccagGT |
| | AAGTCCCGCAGCCGTAACGACCTTGGGGGGGTGTGA |
| | GATTCTCATTCTAATTTTGAAGAATATTAGGTGTAAA |
| | AGCAAGAAATACAATGATCCTGAGGTGACACGCTTA |
| | TGTTTTACTTTTAAACTAGGT (SEQ ID NO: 609) |
| Kozak | gccgccACCatg (SEQ ID NO: 529) |
| Rb-NLS | Gaccgtgtgctcaaaagaagtgctgaaggaagcaaccctcctaaaccactgaaaaaactacgc |
| | (SEQ ID NO: 604) |
| Linker | ggaGGATCG |
| 8PUF | GGACGAAGCCGACTCTTGGAAGACTTCAGAAACAAT |
| | CGGTATCCGAACCTTCAGCTGAGAGAAATTGCTGGT |
| | CACATCATGGAATTTTCTCAAGATCAACATGGAAGC |
| | CGGTTTATTGAACTTAAACTCGAACGAGCCACCCCG |
| | GCCGAAAGGCAATTGGTGTTCAATGAAATTCTTCAG |
| | GCCGCATACCAACTCATGGTTGATGTTTTTGGGAACT |
| | ATGTTATTCAAAAGTTTTTTGAGTTCGGGTCACTGGA |
| | GCAAAAGTTGGCATTGGCAGAGCGAATCCGGGGCCA |
| | TGTTCTGAGCCTCGCTCTCCAAATGTACGGTAGTTAT |
| | GTCATTCGCAAAGCACTCGAGTTCATACCATCAGATC |
| | AACAGAATGAGATGGTGCGGGAGCTGGATGGGCATG |
| | TTTTGAAATGCGTGAAAGACCAAAACGGTAGCTACG |
| | TAGTTGAGAAATGCATCGAATGCGTCCAACCACAGT |
| | CTCTCCAATTTATTATAGATGCATTTAAGGGTCAGGT |
| | TTTCGCGCTTTCTACGCACCCGTATGGGAACCGAGTG |
| | ATTCAGAGAATCTTGGAGCACTGCCTGCCGGATCAG |
| | ACACTCCCTATCTTGGAGGAATTGCACCAGCATACCG |
| | AACAATTGGTGCAAGATCAATACGGTTCATATGTTAT |
| | TCGGCACGTTCTTGAGCATGGAAGGCCAGAGGACAA |
| | GTCAAAGATCGTCGCTGAGATTAGAGGTAACGTATT |
| | GGTGCTCTCACAACACAAATTTGCATCTAATGTGGTG |
| | GAGAAATGTGTTACTCATGCTTCTAGAACGGAAAGG |
| | GCAGTTCTCATAGACGAAGTTTGCACAATGAATGAT |
| | GGTCCTCATAGCGCACTTTATACCATGATGAAGGACC |
| | AGTATGCAAACTATGTCGTCCAGAAAATGATCGATG |
| | TGGCGGAGCCCGGTCAACGGAAAATCGTGATGCACA |
| | AAATCCGACCTCACATTGCTACACTCAGAAAATACA |
| | CGTATGGAAAACATATTCTGGCTAAGCTGGAGAAAT |
| | ATTACATGAAGAATGGAGTGGATCTGGGG (SEQ ID |
| | NO: 452) |
| Linker | GGCGGAAGT (SEQ ID NO: 611) |
| Myc tag | GAGCAAAAACTGATTAGTGAAGAAGATCTC |
| WPRE | Aatcaacctctggattacaaaatttgtgaaagattgactggtattcttaactatgttgctcct |
| | tttacgctatgtggatacgctgctttaatgcctttgtatcatgctattgcttcccgtatggcttt |
| | cattttctcctccttgtataaatcctggttgctgtctctttatgaggagttgtggcccgttgtca |
| | ggcaacgtggcgtggtgtgcactgtgtttgctgacgcaacccccactggttggggcatt |
| | gccaccacctgtcagctcctttccgggactttcgctttccccctccctattgccacggcgg |
| | aactcatcgccgcctgccttgcccgctgctggacaggggctcggctgttgggcactga |
| | caattccgtggtgttgtcggggaaatcatcgtcctttccttggctgctcgcctgtgttgcca |
| | cctggattctgcgcgggacgtccttctgctacgtcccttcggccctcaatccagcggacc |
| | ttccttcccgcggcctgctgccggctctgcggcctcttccgcgtcttcgccttcgccctca |
| | gacgagtcggatctccctttgggccgcctccccgc (SEQ ID NO: 607) |
| SV-40 poly A | AACTTGTTTATTGCAGCTTATAATGGTTACAAATAAA |
| | GCAATAGCATCACAAATTTCACAAATAAAGCATTTTT |
| | TTCACTGCATTCTAGTTGTGGTTTGTCCAAACTCATC |
| | AATGTATCTTA (SEQ ID NO: 533) |
| 3′ITR | AGGAACCCCTAGTGATGGAGTTGGCCACTCCCTCTCT |
| | GCGCGCTCGCTCGCTCACTGAGGCCGGGCGACCAAA |
| | GGTCGCCCGACGCCCGGGCTTTGCCCGGGCGGCCTC |
| | AGTGAGCGAGCGAGCGCGCAGCTGCCTGCAGG (SEQ ID |
| | NO: 600) |

A01560: dCas13d dSeq212 Targeting CUG No Endonuclease (4 Point Mutations on Catalytic Domain)

[0152] In some embodiments, the disclosure provides a CUG-targeting catalytically inactive Cas (dCas13d) having 4 point mutations as set forth in Table J.

TABLE J
Exemplary CUG-Targeting dCas13d for blocking CUG RNA

| Plasmid Element | Amino Acid Sequences |
|---|---|
| dCas13d Seq212 | KKKHQSAAEKRQVKKLKNQEKAQKYASEPSPLQSDTAGVECSQKKTVVS |
| | HIASSKTLAKAMGLKSTLVMGDKLVITSFAASKAVGGAGYKSANIEKITDL |
| | QGRVIEEHERMFSADVGEKNIELSKNDCHTNVNNPVVTNIGKDYIGLKSRL |
| | EQEFFGKTFENDNLHVQLAYNILDIKKILGTYVNNIIYIFYNLNRAGTGRDE |
| | RMYDDLIGTLYAYKPMEAQQTYLLKGDKDMRRFEEVKQLLQNTSAYYVY |
| | YGTLFEKVKAKSKKEQRAKEAEIDACTAHNYDVLRLLSLMAQLCMASVA |
| | GTAFKLAESALFNIEDVLSADLKEILDEAFSGAVNKLNDGFVQHSGNNLYV |
| | LQQLYPNETIERIAEKYYRLTVRKEDLNMGVNIKKLRELIVGQYFPEVLDK |
| | EYDLSKNGDSVVTYRSKIYTVMNYILLYYLEDHDSSRESMVEALRQNREG |
| | DEGKEEIYRQFAKKVWNGVSGLFGVCLNLFKTEKRNKFRSKVALPDVSGA |
| | AYMLSSENIDYFVKMLFFVCKFLDGKEINELLCALINKFDNIADILDAAAQC |
| | GSSVWFVDSYRFFERSRRISAQIRIVKNIASKDFKKSKKDSDESYPEQLYLD |
| | ALALLGDVISKYKQNRDGSVVIDDQGNAVLTEQYKRFRYEFFEEIKRDESG |
| | GIKYKKSGKPEYNHQRRNFILNNVLKSKWFFYVVKYNRPSSCRELMKNKEI |
| | LRFVLRDIPDSQVRRYFKAVQGEEAYASAEAMRTRLVDALSQFSVTACLD |
| | EVGGMTDKEFASQRAVDSKEKLRAIIRLYLTVAYLITKSMVKVNTRFSIAFS |
| | VLERDYYLLIDGKKKSSDYTGEDMLALTRKFVGEDAGLYREWKEKNAEA |
| | KDKYFDKAERKKVLRQNDKMIRKMHFTPHSLNYVQKNLESVQSNGLAAV |
| | IKEYANAVAALNIINRLDEYIGSARADSYYSLYCYCLQMYLSKNFSVGYLI |
| | NVQKQLEEHHTYMKDLMWLLNIPFAYNLARYKNLSNEKLFYDEEAAAEK |
| | ADKAENERGE (SEQ ID NO: 583) |
| Linker | GS |
| SV-40 NLS | PKKKRKV (SEQ ID NO: 437) |
| Linker | GGS |
| Myc Tag | EQKLISEEDL (SEQ ID NO: 610) |

[0153] In some embodiments, an AAV vector of the disclosure, referred to as A01560, comprising a CUG-targeting dCas13d protein comprises from 5′ to 3′ the elements as set forth in Table K. In some aspects, the AAV vector comprises the nucleic acid sequence set forth in SEQ ID NO: 584 or 585.

TABLE K
Exemplary AAV vector A01560 comprising a CUG-Targeting dCas13d

| Plasmid Element | Amino Acid Sequences |
|---|---|
| 5′ ITR | Cctgcaggcagctgcgcgctcgctcgctcactgaggccgcccgggcgtcgggcgacctttggtcgcccggc |
| | ctcagtgagcgagcgagcgcgcagagagggagtggccaactccatcactaggggttcct (SEQ ID |
| | NO: 599) |
| Human U6 promoter | Gagggcctatttcccatgattccttcatatttgcatatacgatacaaggctgttagagagataattggaatt |
| | aatttgactgtaaacacaaagatattagtacaaaatacgtgacgtagaaagtaataatttcttgggtagttt |
| | gcagttttaaaattatgttttaaaatggactatcatatgcttaccgtaacttgaaagtatttcgatttcttg |
| | gctttatatatcttgtggaaaggacgaaacacc (SEQ ID NO: 519) |
| Seq212 direct | Tagccctgcagtaaggcagggttctaagac (SEQ ID NO: 614) |
| repeat (DR) | |
| Spacer (CTG guide 3) | CAGCAGCAGCAGCAGCAGCAGCAGCA (SEQ ID NO: 459) |
| EFS/UBB promoter | GGGCAGAGCGCACATCGCCCACAGTCCCCGAGAAGTTGGGGGGAGGGG |
| | TCGGCAATTGAaCCGGTGCCTAGAGAAGGTGGCGCGGGGTAAACTGGG |
| | AAAGTGATGTCGTGTACTGGCTCCGCCTTTTTCCCGAGGGTGGGGGAGA |
| | ACCGTATATAAGTGCAGTAGTCGCCGTGAACGTTCTTTTTCGCAACGGG |
| | TTTGCCGCCAGAACACAGaattccagGTAAGTCCCGCAGCCGTAACGACCTT |
| | GGGGGGGTGTGAGATTCTCATTCTAATTTTGAAGAATATTAGGTGTAAA |
| | AGCAAGAAATACAATGATCCTGAGGTGACACGCTTATGTTTTACTTTTA |
| | AACTAGGT (SEQ ID NO: 609) |
| Kozak Sequence | GCCGCCACCATG (SEQ ID NO: 529) |
| Dead Cas13d Seq212 | AAGAAGAAGCACCAGAGCGCCGCCGAGAAGAGGCAAGTGAAGAAGCT |
| | CAAGAATCAAGAGAAGGCCCAGAAGTACGCTAGCGAGCCTTCCCCCCT |
| | CCAGAGCGATACAGCTGGCGTGGAATGCTCCCAGAAAAAGACAGTCGT |
| | CAGCCACATTGCCAGCTCCAAGACACTGGCCAAGGCTATGGGACTCAA |
| | ATCCACACTGGTCATGGGCGACAAGCTGGTCATCACCAGCTTTGCTGCT |
| | AGCAAGGCTGTCGGAGGCGCTGGCTACAAAAGCGCTAACATTGAAAAA |
| | ATCACAGATCTGCAAGGAAGGGTCATTGAGGAGCACGAAAGGATGTTT |
| | AGCGCCGATGTCGGAGAGAAAAATATCGAACTGAGCAAGAATGACTGC |
| | CACACCAACGTCAACAACCCCGTGGTGACCAACATCGGAAAGGATTAC |
| | ATCGGACTGAAATCTAGGCTGGAGCAAGAGTTTTTCGGCAAGACATTCG |
| | AGAATGACAATCTGCATGTGCAGCTGGCCTACAATATCCTCGACATCAA |
| | GAAAATTCTGGGAACCTATGTGAACAATATCATTTATATCTTCTACAAT |
| | CTGAATAGGGCTGGCACCGGCAGAGATGAGAGGATGTATGACGACCTC |
| | ATCGGCACACTGTACGCTTACAAACCCATGGAGGCTCAACAGACCTATC |
| | TGCTCAAAGGCGACAAGGATATGAGGAGGTTTGAGGAGGTGAAACAGC |
| | TGCTGCAAAACACCTCCGCTTACTATGTGTATTACGGCACACTGTTCGA |
| | GAAGGTGAAGGCTAAGAGCAAGAAGGAACAGAGGGCTAAGGAGGCCG |
| | AAATCGACGCTTGTACCGCCCATAACTACGATGTGCTGAGACTGCTGTC |
| | CCTCATGgcGCAGCTGTGCATGgcCTCCGTCGCTGGAACAGCCTTTAAGC |
| | TGGCTGAGTCCGCTCTGTTCAACATTGAGGATGTGCTCAGCGCCGATCT |
| | GAAGGAAATCCTCGATGAAGCCTTCTCCGGCGCCGTGAACAAGCTCAAT |
| | GACGGATTCGTGCAGCACTCCGGCAACAATCTGTACGTGCTCCAGCAGC |
| | TGTACCCTAATGAGACCATCGAGAGAATCGCCGAGAAGTACTACAGAC |
| | TCACCGTGAGGAAGGAGGATCTGAACATGGGAGTCAACATTAAAAAGC |
| | TGAGGGAGCTGATCGTGGGCCAATACTTTCCCGAGGTCCTCGACAAAGA |
| | ATACGACCTCTCCAAGAATGGAGACAGCGTGGTGACATACAGAAGCAA |
| | GATTTATACCGTGATGAATTACATTCTGCTGTATTACCTCGAGGACCAC |
| | GACTCCAGCAGAGAAAGCATGGTCGAAGCTCTGAGACAAAACAGAGAG |
| | GGCGATGAAGGCAAGGAGGAGATCTATAGACAGTTTGCCAAGAAGGTG |
| | TGGAACGGCGTGTCCGGACTGTTTGGCGTGTGTCTGAACCTCTTCAAGA |
| | CCGAAAAGAGAAACAAGTTTAGGAGCAAAGTCGCCCTCCCCGATGTGT |
| | CCGGCGCTGCCTATATGCTCTCCTCCGAGAACATCGACTACTTTGTCAA |
| | GATGCTCTTCTTTGTGTGTAAGTTTCTGGATGGCAAAGAAATCAACGAG |
| | CTGCTGTGCGCTCTGATCAACAAATTTGATAATATTGCCGATATTCTGG |
| | ATGCTGCCGCTCAATGTGGCTCCTCCGTCTGGTTCGTGGACAGCTATAG |
| | GTTCTTCGAGAGATCTAGGAGGATTAGCGCCCAGATTAGAATCGTGAAG |
| | AACATCGCTTCCAAGGATTTTAAGAAATCCAAGAAGGATTCCGATGAG |
| | AGCTACCCCGAGCAGCTGTATCTGGATGCTCTGGCTCTGCTCGGAGACG |
| | TCATCTCCAAGTACAAGCAGAATAGAGATGGCAGCGTCGTCATCGATG |
| | ACCAAGGCAATGCCGTGCTGACAGAGCAATACAAGAGGTTTAGATATG |
| | AATTTTTCGAGGAGATCAAGAGGGACGAAAGCGGCGGCATCAAGTACA |
| | AGAAGTCCGGAAAACCCGAGTACAACCATCAGAGAAGGAATTTTATTC |
| | TGAATAATGTGCTGAAAAGCAAATGGTTTTTCTATGTGGTGAAGTACAA |
| | TAGGCCCAGCAGCTGCAGAGAACTGATGAAGAATAAGGAAATTCTGAG |
| | GTTCGTGCTGAGAGACATCCCCGACTCCCAAGTGAGAAGATACTTTAAG |
| | GCCGTCCAAGGAGAGGAAGCTTACGCTAGCGCCGAAGCTATGAGGACA |
| | AGACTGGTCGACGCTCTGTCCCAATTTAGCGTCACAGCTTGTCTGGATG |
| | AAGTGGGCGGCATGACAGACAAGGAATTCGCCTCCCAGAGGGCCGTCG |
| | ATAGCAAAGAAAAACTGAGAGCCATCATCAGACTGTATCTGACAGTCG |
| | CCTATCTGATTACCAAGAGCATGGTGAAGGTGAATACAAGGTTTAGCAT |
| | TGCCTTTAGCGTGCTGGAGAGGGACTACTATCTGCTCATTGACGGCAAG |
| | AAGAAATCCAGCGACTACACCGGAGAGGATATGCTGGCTCTGACCAGA |
| | AAATTTGTGGGCGAAGATGCTGGACTGTATAGAGAGTGGAAAGAGAAG |
| | AACGCTGAAGCCAAGGACAAATATTTTGACAAGGCCGAAAGGAAGAAG |
| | GTGCTGAGACAGAACGATAAGATGATCAGAAAGATGCACTTCACACCC |
| | CACTCCCTCAATTACGTCCAAAAGAATCTCGAAAGCGTCCAGAGCAACG |
| | GACTGGCCGCCGTCATCAAGGAATATgcAAATGCCGTCGCTgcCCTCAAT |
| | ATCATCAATAGACTGGACGAGTACATTGGCTCCGCTAGGGCTGATAGCT |
| | ACTACTCTCTGTACTGTTACTGCCTCCAAATGTATCTGAGCAAGAACTTC |
| | AGCGTGGGCTACCTCATCAACGTGCAAAAGCAGCTGGAGGAGCACCAC |
| | ACCTACATGAAGGATCTCATGTGGCTGCTCAACATCCCCTTCGCTTACA |
| | ACCTCGCCAGATACAAAAATCTGTCCAACGAAAAACTCTTTTACGACGA |
| | GGAAGCCGCCGCCGAAAAGGCTGACAAGGCTGAGAACGAGAGAGGCG |
| | AA (SEQ ID NO: 612) |
| Linker | GGAAGC |
| SV-40 NLS | CCCAAGAAGAAAAGGAAGGTC (SEQ ID NO: 532) |
| Linker | GGCGGAtct (SEQ ID NO: 613) |
| Myc Tag | GAGCAgAAACTGATTAGcGAAGAgGATCTC (SEQ ID NO: 602) |
| WPRE3 | GATAATCAACCTCTGGATTACAAAATTTGTGAAAGATTGACTGGTATTC |
| | TTAACTATGTTGCTCCTTTTACGCTATGTGGATACGCTGCTTTAATGCCT |
| | TTGTATCATGCTATTGCTTCCCGTATGGCTTTCATTTTCTCCTCCTTGTAT |
| | AAATCCTGGTTAGTTCTTGCCACGGCGGAACTCATCGCCGCCTGCCTTG |
| | CCCGCTGCTGGACAGGGGCTCGGCTGTTGGGCACTGACAATTCCGTGG |
| | (SEQ ID NO: 603) |
| SV-40 poly A | AACTTGTTTATTGCAGCTTATAATGGTTACAAATAAAGCAATAGCATCA |
| | CAAATTTCACAAATAAAGCATTTTTTTCACTGCATTCTAGTTGTGGTTTG |
| | TCCAAACTCATCAATGTATCTTA (SEQ ID NO: 533) |
| 3′ITR | Aggaacccctagtgatggagttggccactccctctctgcgcgctcgctcgctcactgaggccgggcgacca |
| | aaggtcgcccgacgcccgggctttgcccgggcggcctcagtgagcgagcgagcgcgcagctgcctgcagg |
| | (SEQ ID NO: 600) |

Cas13d: dSeq212 Targeting CUG No Endonuclease (with 1 Point Mutation H919A at HEPN2)

[0154] In some embodiments, the disclosure provides a CUG-targeting catalytically inactive Cas (dCas13d) having an H919A mutation at HEPN2 as set forth in Table L.

TABLE L
Exemplary CUG-Targeting dcas13d for blocking CUG RNA

| Plasmid | |
|---|---|
| Element | Amino Acid Sequences |
| Dead Seq212 | KKKHQSAAEKRQVKKLKNQEKAQKYASEPSPLQSDTAGVECSQKKTVVSHIASSKTLAKAMG |
| H919A | LKSTLVMGDKLVITSFAASKAVGGAGYKSANIEKITDLQGRVIEEHERMFSADVGEKNIELSKN |
| | DCHTNVNNPVVTNIGKDYIGLKSRLEQEFFGKTFENDNLHVQLAYNILDIKKILGTYVNNIIYIF |
| | YNLNRAGTGRDERMYDDLIGTLYAYKPMEAQQTYLLKGDKDMRRFEEVKQLLQNTSAYYVY |
| | YGTLFEKVKAKSKKEQRAKEAEIDACTAHNYDVLRLLSLMRQLCMHSVAGTAFKLAESALFN |
| | IEDVLSADLKEILDEAFSGAVNKLNDGFVQHSGNNLYVLQQLYPNETIERIAEKYYRLTVRKED |
| | LNMGVNIKKLRELIVGQYFPEVLDKEYDLSKNGDSVVTYRSKIYTVMNYILLYYLEDHDSSRE |
| | SMVEALRQNREGDEGKEEIYRQFAKKVWNGVSGLFGVCLNLFKTEKRNKFRSKVALPDVSGA |
| | AYMLSSENIDYFVKMLFFVCKFLDGKEINELLCALINKFDNIADILDAAAQCGSSVWFVDSYRF |
| | FERSRRISAQIRIVKNIASKDFKKSKKDSDESYPEQLYLDALALLGDVISKYKQNRDGSVVIDDQ |
| | GNAVLTEQYKRFRYEFFEEIKRDESGGIKYKKSGKPEYNHQRRNFILNNVLKSKWFFYVVKYN |
| | RPSSCRELMKNKEILRFVLRDIPDSQVRRYFKAVQGEEAYASAEAMRTRLVDALSQFSVTACL |
| | DEVGGMTDKEFASQRAVDSKEKLRAIIRLYLTVAYLITKSMVKVNTRFSIAFSVLERDYYLLID |
| | GKKKSSDYTGEDMLALTRKFVGEDAGLYREWKEKNAEAKDKYFDKAERKKVLRQNDKMIR |
| | KMHFTPHSLNYVQKNLESVOSNGLAAVIKEYRNAVAALNIINRLDEYIGSARADSYYSLYCYC |
| | LQMYLSKNFSVGYLINVQKQLEEHHTYMKDLMWLLNIPFAYNLARYKNLSNEKLFYDEEAAA |
| | EKADKAENERGE (SEQ ID NO: 586) |
| Linker | GS |
| SV-40 NLS | PKKKRKV (SEQ ID NO: 437) |
| Linker | GGS |
| Myc Tag | EQKLISEEDL (SEQ ID NO: 610) |

[0155] In some embodiments, an AAV vector of the disclosure, comprising a CUG-targeting dCas13d protein comprises from 5′ to 3′ the elements as set forth in Table M. In some aspects, the AAV vector comprises the nucleic acid sequence set forth in SEQ ID NO: 590 or 591.

TABLE M
Exemplary AAV vector comprising a CUG-Targeting dCas13d

| Plasmid | |
|---|---|
| Element | Amino Acid Sequences |
| 5′ ITR | Cctgcaggcagctgcgcgctcgctcgctcactgaggccgcccgggcgtcgggcgacctttggtcgcccggcctcagtg |
| | agcgagcgagcgcgcagagagggagtggccaactccatcactaggggttcct (SEQ ID NO: 599) |
| Human U6 | Gagggcctatttcccatgattccttcatatttgcatatacgatacaaggctgttagagagataattggaattaatttg |
| promoter | actgtaaacacaaagatattagtacaaaatacgtgacgtagaaagtaataatttcttgggtagtttgcagttttaaaa |
| | ttatgttttaaaatggactatcatatgcttaccgtaacttgaaagtatttcgatttcttggctttatatatcttgtgga |
| | aaggacgaaacacc (SEQ ID NO: 519) |
| Seq212 direct | Tagccctgcagtaaggcagggttctaagac (SEQ ID NO: 614) |
| repeat (DR) | |
| Spacer (CTG | CAGCAGCAGCAGCAGCAGCAGCAGCA (SEQ ID NO: 459) |
| guide 3) | |
| EFS/UBB | GGGCAGAGCGCACATCGCCCACAGTCCCCGAGAAGTTGGGGGGAGGGGTCGGCAATTGAa |
| promoter | CCGGTGCCTAGAGAAGGTGGCGCGGGGTAAACTGGGAAAGTGATGTCGTGTACTGGCTCC |
| | GCCTTTTTCCCGAGGGTGGGGGAGAACCGTATATAAGTGCAGTAGTCGCCGTGAACGTTCT |
| | TTTTCGCAACGGGTTTGCCGCCAGAACACAGaattccagGTAAGTCCCGCAGCCGTAACGACCT |
| | TGGGGGGGTGTGAGATTCTCATTCTAATTTTGAAGAATATTAGGTGTAAAAGCAAGAAATA |
| | CAATGATCCTGAGGTGACACGCTTATGTTTTACTTTTAAACTAGGT (SEQ ID NO: 609) |
| Kozak Sequence | GCCGCCACCATG (SEQ ID NO: 529) |
| dCas13dSeq212 | AAGAAGAAGCACCAGAGCGCCGCCGAGAAGAGGCAAGTGAAGAAGCTCAAGAATCAAGA |
| H919A | GAAGGCCCAGAAGTACGCTAGCGAGCCTTCCCCCCTCCAGAGCGATACAGCTGGCGTGGA |
| | ATGCTCCCAGAAAAAGACAGTCGTCAGCCACATTGCCAGCTCCAAGACACTGGCCAAGGC |
| | TATGGGACTCAAATCCACACTGGTCATGGGCGACAAGCTGGTCATCACCAGCTTTGCTGCT |
| | AGCAAGGCTGTCGGAGGCGCTGGCTACAAAAGCGCTAACATTGAAAAAATCACAGATCTG |
| | CAAGGAAGGGTCATTGAGGAGCACGAAAGGATGTTTAGCGCCGATGTCGGAGAGAAAAA |
| | TATCGAACTGAGCAAGAATGACTGCCACACCAACGTCAACAACCCCGTGGTGACCAACAT |
| | CGGAAAGGATTACATCGGACTGAAATCTAGGCTGGAGCAAGAGTTTTTCGGCAAGACATT |
| | CGAGAATGACAATCTGCATGTGCAGCTGGCCTACAATATCCTCGACATCAAGAAAATTCTG |
| | GGAACCTATGTGAACAATATCATTTATATCTTCTACAATCTGAATAGGGCTGGCACCGGCA |
| | GAGATGAGAGGATGTATGACGACCTCATCGGCACACTGTACGCTTACAAACCCATGGAGG |
| | CTCAACAGACCTATCTGCTCAAAGGCGACAAGGATATGAGGAGGTTTGAGGAGGTGAAAC |
| | AGCTGCTGCAAAACACCTCCGCTTACTATGTGTATTACGGCACACTGTTCGAGAAGGTGAA |
| | GGCTAAGAGCAAGAAGGAACAGAGGGCTAAGGAGGCCGAAATCGACGCTTGTACCGCCC |
| | ATAACTACGATGTGCTGAGACTGCTGTCCCTCATGagGCAGCTGTGCATGcaCTCCGTCGCTG |
| | GAACAGCCTTTAAGCTGGCTGAGTCCGCTCTGTTCAACATTGAGGATGTGCTCAGCGCCGA |
| | TCTGAAGGAAATCCTCGATGAAGCCTTCTCCGGCGCCGTGAACAAGCTCAATGACGGATTC |
| | GTGCAGCACTCCGGCAACAATCTGTACGTGCTCCAGCAGCTGTACCCTAATGAGACCATCG |
| | AGAGAATCGCCGAGAAGTACTACAGACTCACCGTGAGGAAGGAGGATCTGAACATGGGA |
| | GTCAACATTAAAAAGCTGAGGGAGCTGATCGTGGGCCAATACTTTCCCGAGGTCCTCGAC |
| | AAAGAATACGACCTCTCCAAGAATGGAGACAGCGTGGTGACATACAGAAGCAAGATTTAT |
| | ACCGTGATGAATTACATTCTGCTGTATTACCTCGAGGACCACGACTCCAGCAGAGAAAGCA |
| | TGGTCGAAGCTCTGAGACAAAACAGAGAGGGCGATGAAGGCAAGGAGGAGATCTATAGA |
| | CAGTTTGCCAAGAAGGTGTGGAACGGCGTGTCCGGACTGTTTGGCGTGTGTCTGAACCTCT |
| | TCAAGACCGAAAAGAGAAACAAGTTTAGGAGCAAAGTCGCCCTCCCCGATGTGTCCGGCG |
| | CTGCCTATATGCTCTCCTCCGAGAACATCGACTACTTTGTCAAGATGCTCTTCTTTGTGTGT |
| | AAGTTTCTGGATGGCAAAGAAATCAACGAGCTGCTGTGCGCTCTGATCAACAAATTTGATA |
| | ATATTGCCGATATTCTGGATGCTGCCGCTCAATGTGGCTCCTCCGTCTGGTTCGTGGACAGC |
| | TATAGGTTCTTCGAGAGATCTAGGAGGATTAGCGCCCAGATTAGAATCGTGAAGAACATC |
| | GCTTCCAAGGATTTTAAGAAATCCAAGAAGGATTCCGATGAGAGCTACCCCGAGCAGCTG |
| | TATCTGGATGCTCTGGCTCTGCTCGGAGACGTCATCTCCAAGTACAAGCAGAATAGAGATG |
| | GCAGCGTCGTCATCGATGACCAAGGCAATGCCGTGCTGACAGAGCAATACAAGAGGTTTA |
| | GATATGAATTTTTCGAGGAGATCAAGAGGGACGAAAGCGGCGGCATCAAGTACAAGAAGT |
| | CCGGAAAACCCGAGTACAACCATCAGAGAAGGAATTTTATTCTGAATAATGTGCTGAAAA |
| | GCAAATGGTTTTTCTATGTGGTGAAGTACAATAGGCCCAGCAGCTGCAGAGAACTGATGA |
| | AGAATAAGGAAATTCTGAGGTTCGTGCTGAGAGACATCCCCGACTCCCAAGTGAGAAGAT |
| | ACTTTAAGGCCGTCCAAGGAGAGGAAGCTTACGCTAGCGCCGAAGCTATGAGGACAAGAC |
| | TGGTCGACGCTCTGTCCCAATTTAGCGTCACAGCTTGTCTGGATGAAGTGGGCGGCATGAC |
| | AGACAAGGAATTCGCCTCCCAGAGGGCCGTCGATAGCAAAGAAAAACTGAGAGCCATCAT |
| | CAGACTGTATCTGACAGTCGCCTATCTGATTACCAAGAGCATGGTGAAGGTGAATACAAG |
| | GTTTAGCATTGCCTTTAGCGTGCTGGAGAGGGACTACTATCTGCTCATTGACGGCAAGAAG |
| | AAATCCAGCGACTACACCGGAGAGGATATGCTGGCTCTGACCAGAAAATTTGTGGGCGAA |
| | GATGCTGGACTGTATAGAGAGTGGAAAGAGAAGAACGCTGAAGCCAAGGACAAATATTTT |
| | GACAAGGCCGAAAGGAAGAAGGTGCTGAGACAGAACGATAAGATGATCAGAAAGATGCA |
| | CTTCACACCCCACTCCCTCAATTACGTCCAAAAGAATCTCGAAAGCGTCCAGAGCAACGGA |
| | CTGGCCGCCGTCATCAAGGAATATagAAATGCCGTCGCTgcCCTCAATATCATCAATAGACT |
| | GGACGAGTACATTGGCTCCGCTAGGGCTGATAGCTACTACTCTCTGTACTGTTACTGCCTC |
| | CAAATGTATCTGAGCAAGAACTTCAGCGTGGGCTACCTCATCAACGTGCAAAAGCAGCTG |
| | GAGGAGCACCACACCTACATGAAGGATCTCATGTGGCTGCTCAACATCCCCTTCGCTTACA |
| | ACCTCGCCAGATACAAAAATCTGTCCAACGAAAAACTCTTTTACGACGAGGAAGCCGCCG |
| | CCGAAAAGGCTGACAAGGCTGAGAACGAGAGAGGCGAA (SEQ ID NO: 615) |
| Linker | GGAAGC |
| SV-40 NLS | CCCAAGAAGAAAAGGAAGGTC (SEQ ID NO: 532) |
| Linker | GGCGGAtct (SEQ ID NO: 613) |
| Myc Tag | GAGCAgAAACTGATTAGcGAAGAgGATCTC (SEQ ID NO: 602) |
| WPRE3 | GATAATCAACCTCTGGATTACAAAATTTGTGAAAGATTGACTGGTATTCTTAACTATGTTG |
| | CTCCTTTTACGCTATGTGGATACGCTGCTTTAATGCCTTTGTATCATGCTATTGCTTCCCGTA |
| | TGGCTTTCATTTTCTCCTCCTTGTATAAATCCTGGTTAGTTCTTGCCACGGCGGAACTCATC |
| | GCCGCCTGCCTTGCCCGCTGCTGGACAGGGGCTCGGCTGTTGGGCACTGACAATTCCGTGG |
| | (SEQ ID NO: 603) |
| SV-40 poly A | AACTTGTTTATTGCAGCTTATAATGGTTACAAATAAAGCAATAGCATCACAAATTTCACAA |
| | ATAAAGCATTTTTTTCACTGCATTCTAGTTGTGGTTTGTCCAAACTCATCAATGTATCTTA |
| | (SEQ ID NO: 533) |
| 3′ITR | Aggaacccctagtgatggagttggccactccctctctgcgcgctcgctcgctcactgaggccgggcgaccaaaggtcg |
| | cccgacgcccgggctttgcccgggcggcctcagtgagcgagcgagcgcgcagctgcctgcagg (SEQ ID NO: 600) |

Cas13d: dSeq212 Targeting CUG No Endonuclease (with 1 Point Mutation R914A at HEPN2)

[0156] In some embodiments, the disclosure provides a CUG-targeting catalytically inactive Cas (dCas13d) having an H914A mutation as set forth in Table N.

TABLE N
Exemplary CUG-Targeting dcas 13d for blocking CUG RNA

| Plasmid | |
|---|---|
| Element | Amino Acid Sequences |
| Dead dCas13d | KKKHQSAAEKRQVKKLKNQEKAQKYASEPSPLQSDTAGVECSQKKTVVSHIASSKTLAKAMG |
| Seq212 R914A | LKSTLVMGDKLVITSFAASKAVGGAGYKSANIEKITDLQGRVIEEHERMFSADVGEKNIELSKN |
| | DCHTNVNNPVVTNIGKDYIGLKSRLEQEFFGKTFENDNLHVQLAYNILDIKKILGTYVNNIIYIF |
| | YNLNRAGTGRDERMYDDLIGTLYAYKPMEAQQTYLLKGDKDMRRFEEVKQLLQNTSAYYVY |
| | YGTLFEKVKAKSKKEQRAKEAEIDACTAHNYDVLRLLSLMRQLCMHSVAGTAFKLAESALFN |
| | IEDVLSADLKEILDEAFSGAVNKLNDGFVQHSGNNLYVLQQLYPNETIERIAEKYYRLTVRKED |
| | LNMGVNIKKLRELIVGQYFPEVLDKEYDLSKNGDSVVTYRSKIYTVMNYILLYYLEDHDSSRE |
| | SMVEALRQNREGDEGKEEIYRQFAKKVWNGVSGLFGVCLNLFKTEKRNKFRSKVALPDVSGA |
| | AYMLSSENIDYFVKMLFFVCKFLDGKEINELLCALINKFDNIADILDAAAQCGSSVWFVDSYRF |
| | FERSRRISAQIRIVKNIASKDFKKSKKDSDESYPEQLYLDALALLGDVISKYKQNRDGSVVIDDQ |
| | GNAVLTEQYKRFRYEFFEEIKRDESGGIKYKKSGKPEYNHQRRNFILNNVLKSKWFFYVVKYN |
| | RPSSCRELMKNKEILRFVLRDIPDSQVRRYFKAVQGEEAYASAEAMRTRLVDALSQFSVTACL |
| | DEVGGMTDKEFASQRAVDSKEKLRAIIRLYLTVAYLITKSMVKVNTRFSIAFSVLERDYYLLID |
| | GKKKSSDYTGEDMLALTRKFVGEDAGLYREWKEKNAEAKDKYFDKAERKKVLRQNDKMIR |
| | KMHFTPHSLNYVQKNLESVQSNGLAAVIKEYANAVAHLNIINRLDEYIGSARADSYYSLYCYC |
| | LQMYLSKNFSVGYLINVQKQLEEHHTYMKDLMWLLNIPFAYNLARYKNLSNEKLFYDEEAAA |
| | EKADKAENERGE (SEQ ID NO: 587) |
| Linker | GS |
| SV-40 NLS | PKKKRKV (SEQ ID NO: 437) |
| Linker | GGS |
| Myc Tag | EQKLISEEDL (SEQ ID NO: 610) |

[0157] In some embodiments, an AAV vector of the disclosure, comprising a CUG-targeting dCas13d protein comprises from 5′ to 3′ the elements as set forth in Table O. In some aspects, the AAV vector comprises the nucleic acid sequence set forth in SEQ ID NO. 592 or 593.

TABLE O
Exemplary AAV vector comprising a CUG-Targeting dCas13d

| Plasmid | |
|---|---|
| Element | Amino Acid Sequences |
| 5′ ITR | Cctgcaggcagctgcgcgctcgctcgctcactgaggccgcccgggcgtcgggcgacctttggtcgcccggcctcagtgag |
| | cgagcgagcgcgcagagagggagtggccaactccatcactaggggttcct (SEQ ID NO: 599) |
| Human U6 | Gagggcctatttcccatgattccttcatatttgcatatacgatacaaggctgttagagagataattggaattaatttgac |
| promoter | tgtaaacacaaagatattagtacaaaatacgtgacgtagaaagtaataatttcttgggtagtttgcagttttaaaattat |
| | gttttaaaatggactatcatatgcttaccgtaacttgaaagtatttcgatttcttggctttatatatcttgtggaaagga |
| | cgaaacacc (SEQ ID NO: 519) |
| Seq212 direct | Tagccctgcagtaaggcagggttctaagac (SEQ ID NO: 614) |
| repeat (DR) | |
| Spacer (CTG | CAGCAGCAGCAGCAGCAGCAGCAGCA (SEQ ID NO: 459) |
| guide 3) | |
| EFS/UBB | GGGCAGAGCGCACATCGCCCACAGTCCCCGAGAAGTTGGGGGGAGGGGTCGGCAATTGAa |
| promoter | CCGGTGCCTAGAGAAGGTGGCGCGGGGTAAACTGGGAAAGTGATGTCGTGTACTGGCTCC |
| | GCCTTTTTCCCGAGGGTGGGGGAGAACCGTATATAAGTGCAGTAGTCGCCGTGAACGTTCT |
| | TTTTCGCAACGGGTTTGCCGCCAGAACACAGaattccagGTAAGTCCCGCAGCCGTAACGACCT |
| | TGGGGGGGTGTGAGATTCTCATTCTAATTTTGAAGAATATTAGGTGTAAAAGCAAGAAATA |
| | CAATGATCCTGAGGTGACACGCTTATGTTTTACTTTTAAACTAGGT (SEQ ID NO: 609) |
| Kozak Sequence | GCCGCCACCATG (SEQ ID NO: 529) |
| Dead Seq212 | AAGAAGAAGCACCAGAGCGCCGCCGAGAAGAGGCAAGTGAAGAAGCTCAAGAATCAAGA |
| R914A | GAAGGCCCAGAAGTACGCTAGCGAGCCTTCCCCCCTCCAGAGCGATACAGCTGGCGTGGA |
| | ATGCTCCCAGAAAAAGACAGTCGTCAGCCACATTGCCAGCTCCAAGACACTGGCCAAGGC |
| | TATGGGACTCAAATCCACACTGGTCATGGGCGACAAGCTGGTCATCACCAGCTTTGCTGCT |
| | AGCAAGGCTGTCGGAGGCGCTGGCTACAAAAGCGCTAACATTGAAAAAATCACAGATCTG |
| | CAAGGAAGGGTCATTGAGGAGCACGAAAGGATGTTTAGCGCCGATGTCGGAGAGAAAAA |
| | TATCGAACTGAGCAAGAATGACTGCCACACCAACGTCAACAACCCCGTGGTGACCAACAT |
| | CGGAAAGGATTACATCGGACTGAAATCTAGGCTGGAGCAAGAGTTTTTCGGCAAGACATT |
| | CGAGAATGACAATCTGCATGTGCAGCTGGCCTACAATATCCTCGACATCAAGAAAATTCTG |
| | GGAACCTATGTGAACAATATCATTTATATCTTCTACAATCTGAATAGGGCTGGCACCGGCA |
| | GAGATGAGAGGATGTATGACGACCTCATCGGCACACTGTACGCTTACAAACCCATGGAGG |
| | CTCAACAGACCTATCTGCTCAAAGGCGACAAGGATATGAGGAGGTTTGAGGAGGTGAAAC |
| | AGCTGCTGCAAAACACCTCCGCTTACTATGTGTATTACGGCACACTGTTCGAGAAGGTGAA |
| | GGCTAAGAGCAAGAAGGAACAGAGGGCTAAGGAGGCCGAAATCGACGCTTGTACCGCCC |
| | ATAACTACGATGTGCTGAGACTGCTGTCCCTCATGagGCAGCTGTGCATGcaCTCCGTCGCTG |
| | GAACAGCCTTTAAGCTGGCTGAGTCCGCTCTGTTCAACATTGAGGATGTGCTCAGCGCCGA |
| | TCTGAAGGAAATCCTCGATGAAGCCTTCTCCGGCGCCGTGAACAAGCTCAATGACGGATTC |
| | GTGCAGCACTCCGGCAACAATCTGTACGTGCTCCAGCAGCTGTACCCTAATGAGACCATCG |
| | AGAGAATCGCCGAGAAGTACTACAGACTCACCGTGAGGAAGGAGGATCTGAACATGGGA |
| | GTCAACATTAAAAAGCTGAGGGAGCTGATCGTGGGCCAATACTTTCCCGAGGTCCTCGAC |
| | AAAGAATACGACCTCTCCAAGAATGGAGACAGCGTGGTGACATACAGAAGCAAGATTTAT |
| | ACCGTGATGAATTACATTCTGCTGTATTACCTCGAGGACCACGACTCCAGCAGAGAAAGCA |
| | TGGTCGAAGCTCTGAGACAAAACAGAGAGGGCGATGAAGGCAAGGAGGAGATCTATAGA |
| | CAGTTTGCCAAGAAGGTGTGGAACGGCGTGTCCGGACTGTTTGGCGTGTGTCTGAACCTCT |
| | TCAAGACCGAAAAGAGAAACAAGTTTAGGAGCAAAGTCGCCCTCCCCGATGTGTCCGGCG |
| | CTGCCTATATGCTCTCCTCCGAGAACATCGACTACTTTGTCAAGATGCTCTTCTTTGTGTGT |
| | AAGTTTCTGGATGGCAAAGAAATCAACGAGCTGCTGTGCGCTCTGATCAACAAATTTGATA |
| | ATATTGCCGATATTCTGGATGCTGCCGCTCAATGTGGCTCCTCCGTCTGGTTCGTGGACAGC |
| | TATAGGTTCTTCGAGAGATCTAGGAGGATTAGCGCCCAGATTAGAATCGTGAAGAACATC |
| | GCTTCCAAGGATTTTAAGAAATCCAAGAAGGATTCCGATGAGAGCTACCCCGAGCAGCTG |
| | TATCTGGATGCTCTGGCTCTGCTCGGAGACGTCATCTCCAAGTACAAGCAGAATAGAGATG |
| | GCAGCGTCGTCATCGATGACCAAGGCAATGCCGTGCTGACAGAGCAATACAAGAGGTTTA |
| | GATATGAATTTTTCGAGGAGATCAAGAGGGACGAAAGCGGCGGCATCAAGTACAAGAAGT |
| | CCGGAAAACCCGAGTACAACCATCAGAGAAGGAATTTTATTCTGAATAATGTGCTGAAAA |
| | GCAAATGGTTTTTCTATGTGGTGAAGTACAATAGGCCCAGCAGCTGCAGAGAACTGATGA |
| | AGAATAAGGAAATTCTGAGGTTCGTGCTGAGAGACATCCCCGACTCCCAAGTGAGAAGAT |
| | ACTTTAAGGCCGTCCAAGGAGAGGAAGCTTACGCTAGCGCCGAAGCTATGAGGACAAGAC |
| | TGGTCGACGCTCTGTCCCAATTTAGCGTCACAGCTTGTCTGGATGAAGTGGGCGGCATGAC |
| | AGACAAGGAATTCGCCTCCCAGAGGGCCGTCGATAGCAAAGAAAAACTGAGAGCCATCAT |
| | CAGACTGTATCTGACAGTCGCCTATCTGATTACCAAGAGCATGGTGAAGGTGAATACAAG |
| | GTTTAGCATTGCCTTTAGCGTGCTGGAGAGGGACTACTATCTGCTCATTGACGGCAAGAAG |
| | AAATCCAGCGACTACACCGGAGAGGATATGCTGGCTCTGACCAGAAAATTTGTGGGCGAA |
| | GATGCTGGACTGTATAGAGAGTGGAAAGAGAAGAACGCTGAAGCCAAGGACAAATATTTT |
| | GACAAGGCCGAAAGGAAGAAGGTGCTGAGACAGAACGATAAGATGATCAGAAAGATGCA |
| | CTTCACACCCCACTCCCTCAATTACGTCCAAAAGAATCTCGAAAGCGTCCAGAGCAACGGA |
| | CTGGCCGCCGTCATCAAGGAATATgcAAATGCCGTCGCTcaCCTCAATATCATCAATAGACT |
| | GGACGAGTACATTGGCTCCGCTAGGGCTGATAGCTACTACTCTCTGTACTGTTACTGCCTC |
| | CAAATGTATCTGAGCAAGAACTTCAGCGTGGGCTACCTCATCAACGTGCAAAAGCAGCTG |
| | GAGGAGCACCACACCTACATGAAGGATCTCATGTGGCTGCTCAACATCCCCTTCGCTTACA |
| | ACCTCGCCAGATACAAAAATCTGTCCAACGAAAAACTCTTTTACGACGAGGAAGCCGCCG |
| | CCGAAAAGGCTGACAAGGCTGAGAACGAGAGAGGCGAA (SEQ ID NO: 616) |
| Linker | GGAAGC |
| SV-40 NLS | CCCAAGAAGAAAAGGAAGGTC (SEQ ID NO: 532) |
| Linker | GGCGGAtct (SEQ ID NO: 613) |
| Myc Tag | GAGCAgAAACTGATTAGcGAAGAgGATCTC (SEQ ID NO: 602) |
| WPRE3 | GATAATCAACCTCTGGATTACAAAATTTGTGAAAGATTGACTGGTATTCTTAACTATGTTG |
| | CTCCTTTTACGCTATGTGGATACGCTGCTTTAATGCCTTTGTATCATGCTATTGCTTCCCGTA |
| | TGGCTTTCATTTTCTCCTCCTTGTATAAATCCTGGTTAGTTCTTGCCACGGCGGAACTCATC |
| | GCCGCCTGCCTTGCCCGCTGCTGGACAGGGGCTCGGCTGTTGGGCACTGACAATTCCGTGG |
| | (SEQ ID NO: 603) |
| SV-40 poly A | AACTTGTTTATTGCAGCTTATAATGGTTACAAATAAAGCAATAGCATCACAAATTTCACAA |
| | ATAAAGCATTTTTTTCACTGCATTCTAGTTGTGGTTTGTCCAAACTCATCAATGTATCTTA |
| | (SEQ ID NO: 533) |
| 3′ITR | Aggaacccctagtgatggagttggccactccctctctgcgcgctcgctcgctcactgaggccgggcgaccaaaggtcgcc |
| | cgacgcccgggctttgcccgggcggcctcagtgagcgagcgagcgcgcagctgcctgcagg (SEQ ID NO: 600) |

Cas13d: dSeq212 Targeting CUG No Endonuclease (with 1 Point Mutation R293A at HEPN1)

[0158] In some embodiments, the disclosure provides a CUG-targeting catalytically inactive Cas (dCas13d) having an R293A mutation at HEPN1 as set forth in Table P.

TABLE P
Exemplary CUG-Targeting dcas13d for blocking CUG RNA

| Plasmid | |
|---|---|
| Element | Amino Acid Sequences |
| dCas13d Seq212 | KKKHQSAAEKRQVKKLKNQEKAQKYASEPSPLQSDTAGVECSQKKTVVSHIASSKTLAKAMG |
| R293A | LKSTLVMGDKLVITSFAASKAVGGAGYKSANIEKITDLQGRVIEEHERMFSADVGEKNIELSKN |
| | DCHTNVNNPVVTNIGKDYIGLKSRLEQEFFGKTFENDNLHVQLAYNILDIKKILGTYVNNIIYIF |
| | YNLNRAGTGRDERMYDDLIGTLYAYKPMEAQQTYLLKGDKDMRRFEEVKQLLQNTSAYYVY |
| | YGTLFEKVKAKSKKEQRAKEAEIDACTAHNYDVLRLLSLMAQLCMHSVAGTAFKLAESALFN |
| | IEDVLSADLKEILDEAFSGAVNKLNDGFVQHSGNNLYVLQQLYPNETIERIAEKYYRLTVRKED |
| | LNMGVNIKKLRELIVGQYFPEVLDKEYDLSKNGDSVVTYRSKIYTVMNYILLYYLEDHDSSRE |
| | SMVEALRQNREGDEGKEEIYRQFAKKVWNGVSGLFGVCLNLFKTEKRNKFRSKVALPDVSGA |
| | AYMLSSENIDYFVKMLFFVCKFLDGKEINELLCALINKFDNIADILDAAAQCGSSVWFVDSYRF |
| | FERSRRISAQIRIVKNIASKDFKKSKKDSDESYPEQLYLDALALLGDVISKYKQNRDGSVVIDDQ |
| | GNAVLTEQYKRFRYEFFEEIKRDESGGIKYKKSGKPEYNHQRRNFILNNVLKSKWFFYVVKYN |
| | RPSSCRELMKNKEILRFVLRDIPDSQVRRYFKAVQGEEAYASAEAMRTRLVDALSQFSVTACL |
| | DEVGGMTDKEFASQRAVDSKEKLRAIIRLYLTVAYLITKSMVKVNTRFSIAFSVLERDYYLLID |
| | GKKKSSDYTGEDMLALTRKFVGEDAGLYREWKEKNAEAKDKYFDKAERKKVLRQNDKMIR |
| | KMHFTPHSLNYVQKNLESVQSNGLAAVIKEYRNAVAHLNIINRLDEYIGSARADSYYSLYCYC |
| | LQMYLSKNFSVGYLINVQKQLEEHHTYMKDLMWLLNIPFAYNLARYKNLSNEKLFYDEEAAA |
| | EKADKAENERGE (SEQ ID NO: 588) |
| Linker | GS |
| SV-40 NLS | PKKKRKV (SEQ ID NO: 437) |
| Linker | GGS |
| Myc Tag | EQKLISEEDL (SEQ ID NO: 610) |

[0159] In some embodiments, an AAV vector of the disclosure, comprising a CUG-targeting dCas13d protein comprises from 5′ to 3′ the elements as set forth in Table Q. In some aspects, the AAV vector comprises the nucleic acid sequence set forth in SEQ ID NO. 594 or 595.

TABLE Q
Exemplary AAV vector comprising a CUG-Targeting dCas13d

| Plasmid | |
|---|---|
| Element | Amino Acid Sequences |
| 5′ ITR | Cctgcaggcagctgcgcgctcgctcgctcactgaggccgcccgggcgtcgggcgacctttggtcgcccggcctcagtgagc |
| | gagcgagcgcgcagagagggagtggccaactccatcactaggggttcct (SEQ ID NO: 599) |
| Human U6 | Gagggcctatttcccatgattccttcatatttgcatatacgatacaaggctgttagagagataattggaattaatttgact |
| promoter | gtaaacacaaagatattagtacaaaatacgtgacgtagaaagtaataatttcttgggtagtttgcagttttaaaattatgt |
| | tttaaaatggactatcatatgcttaccgtaacttgaaagtatttcgatttcttggctttatatatcttgtggaaaggacga |
| | aacacc (SEQ ID NO: 519) |
| Seq212 direct | Tagccctgcagtaaggcagggttctaagac (SEQ ID NO: 614) |
| repeat (DR) | |
| Spacer (CTG | CAGCAGCAGCAGCAGCAGCAGCAGCA (SEQ ID NO: 459) |
| guide 3) | |
| EFS/UBB | GGGCAGAGCGCACATCGCCCACAGTCCCCGAGAAGTTGGGGGGAGGGGTCGGCAATTGAa |
| promoter | CCGGTGCCTAGAGAAGGTGGCGCGGGGTAAACTGGGAAAGTGATGTCGTGTACTGGCTCC |
| | GCCTTTTTCCCGAGGGTGGGGGAGAACCGTATATAAGTGCAGTAGTCGCCGTGAACGTTCT |
| | TTTTCGCAACGGGTTTGCCGCCAGAACACAGaattccagGTAAGTCCCGCAGCCGTAACGACCT |
| | TGGGGGGGTGTGAGATTCTCATTCTAATTTTGAAGAATATTAGGTGTAAAAGCAAGAAATA |
| | CAATGATCCTGAGGTGACACGCTTATGTTTTACTTTTAAACTAGGT (SEQ ID NO: 609) |
| Kozak Sequence | GCCGCCACCATG (SEQ ID NO: 529) |
| Dead Seq212 | AAGAAGAAGCACCAGAGCGCCGCCGAGAAGAGGCAAGTGAAGAAGCTCAAGAATCAAGA |
| R293A | GAAGGCCCAGAAGTACGCTAGCGAGCCTTCCCCCCTCCAGAGCGATACAGCTGGCGTGGA |
| | ATGCTCCCAGAAAAAGACAGTCGTCAGCCACATTGCCAGCTCCAAGACACTGGCCAAGGC |
| | TATGGGACTCAAATCCACACTGGTCATGGGCGACAAGCTGGTCATCACCAGCTTTGCTGCT |
| | AGCAAGGCTGTCGGAGGCGCTGGCTACAAAAGCGCTAACATTGAAAAAATCACAGATCTG |
| | CAAGGAAGGGTCATTGAGGAGCACGAAAGGATGTTTAGCGCCGATGTCGGAGAGAAAAA |
| | TATCGAACTGAGCAAGAATGACTGCCACACCAACGTCAACAACCCCGTGGTGACCAACAT |
| | CGGAAAGGATTACATCGGACTGAAATCTAGGCTGGAGCAAGAGTTTTTCGGCAAGACATT |
| | CGAGAATGACAATCTGCATGTGCAGCTGGCCTACAATATCCTCGACATCAAGAAAATTCTG |
| | GGAACCTATGTGAACAATATCATTTATATCTTCTACAATCTGAATAGGGCTGGCACCGGCA |
| | GAGATGAGAGGATGTATGACGACCTCATCGGCACACTGTACGCTTACAAACCCATGGAGG |
| | CTCAACAGACCTATCTGCTCAAAGGCGACAAGGATATGAGGAGGTTTGAGGAGGTGAAAC |
| | AGCTGCTGCAAAACACCTCCGCTTACTATGTGTATTACGGCACACTGTTCGAGAAGGTGAA |
| | GGCTAAGAGCAAGAAGGAACAGAGGGCTAAGGAGGCCGAAATCGACGCTTGTACCGCCC |
| | ATAACTACGATGTGCTGAGACTGCTGTCCCTCATGgcGCAGCTGTGCATGcaCTCCGTCGCTG |
| | GAACAGCCTTTAAGCTGGCTGAGTCCGCTCTGTTCAACATTGAGGATGTGCTCAGCGCCGA |
| | TCTGAAGGAAATCCTCGATGAAGCCTTCTCCGGCGCCGTGAACAAGCTCAATGACGGATTC |
| | GTGCAGCACTCCGGCAACAATCTGTACGTGCTCCAGCAGCTGTACCCTAATGAGACCATCG |
| | AGAGAATCGCCGAGAAGTACTACAGACTCACCGTGAGGAAGGAGGATCTGAACATGGGA |
| | GTCAACATTAAAAAGCTGAGGGAGCTGATCGTGGGCCAATACTTTCCCGAGGTCCTCGAC |
| | AAAGAATACGACCTCTCCAAGAATGGAGACAGCGTGGTGACATACAGAAGCAAGATTTAT |
| | ACCGTGATGAATTACATTCTGCTGTATTACCTCGAGGACCACGACTCCAGCAGAGAAAGCA |
| | TGGTCGAAGCTCTGAGACAAAACAGAGAGGGCGATGAAGGCAAGGAGGAGATCTATAGA |
| | CAGTTTGCCAAGAAGGTGTGGAACGGCGTGTCCGGACTGTTTGGCGTGTGTCTGAACCTCT |
| | TCAAGACCGAAAAGAGAAACAAGTTTAGGAGCAAAGTCGCCCTCCCCGATGTGTCCGGCG |
| | CTGCCTATATGCTCTCCTCCGAGAACATCGACTACTTTGTCAAGATGCTCTTCTTTGTGTGT |
| | AAGTTTCTGGATGGCAAAGAAATCAACGAGCTGCTGTGCGCTCTGATCAACAAATTTGATA |
| | ATATTGCCGATATTCTGGATGCTGCCGCTCAATGTGGCTCCTCCGTCTGGTTCGTGGACAGC |
| | TATAGGTTCTTCGAGAGATCTAGGAGGATTAGCGCCCAGATTAGAATCGTGAAGAACATC |
| | GCTTCCAAGGATTTTAAGAAATCCAAGAAGGATTCCGATGAGAGCTACCCCGAGCAGCTG |
| | TATCTGGATGCTCTGGCTCTGCTCGGAGACGTCATCTCCAAGTACAAGCAGAATAGAGATG |
| | GCAGCGTCGTCATCGATGACCAAGGCAATGCCGTGCTGACAGAGCAATACAAGAGGTTTA |
| | GATATGAATTTTTCGAGGAGATCAAGAGGGACGAAAGCGGCGGCATCAAGTACAAGAAGT |
| | CCGGAAAACCCGAGTACAACCATCAGAGAAGGAATTTTATTCTGAATAATGTGCTGAAAA |
| | GCAAATGGTTTTTCTATGTGGTGAAGTACAATAGGCCCAGCAGCTGCAGAGAACTGATGA |
| | AGAATAAGGAAATTCTGAGGTTCGTGCTGAGAGACATCCCCGACTCCCAAGTGAGAAGAT |
| | ACTTTAAGGCCGTCCAAGGAGAGGAAGCTTACGCTAGCGCCGAAGCTATGAGGACAAGAC |
| | TGGTCGACGCTCTGTCCCAATTTAGCGTCACAGCTTGTCTGGATGAAGTGGGCGGCATGAC |
| | AGACAAGGAATTCGCCTCCCAGAGGGCCGTCGATAGCAAAGAAAAACTGAGAGCCATCAT |
| | CAGACTGTATCTGACAGTCGCCTATCTGATTACCAAGAGCATGGTGAAGGTGAATACAAG |
| | GTTTAGCATTGCCTTTAGCGTGCTGGAGAGGGACTACTATCTGCTCATTGACGGCAAGAAG |
| | AAATCCAGCGACTACACCGGAGAGGATATGCTGGCTCTGACCAGAAAATTTGTGGGCGAA |
| | GATGCTGGACTGTATAGAGAGTGGAAAGAGAAGAACGCTGAAGCCAAGGACAAATATTTT |
| | GACAAGGCCGAAAGGAAGAAGGTGCTGAGACAGAACGATAAGATGATCAGAAAGATGCA |
| | CTTCACACCCCACTCCCTCAATTACGTCCAAAAGAATCTCGAAAGCGTCCAGAGCAACGGA |
| | CTGGCCGCCGTCATCAAGGAATATagAAATGCCGTCGCTcaCCTCAATATCATCAATAGACT |
| | GGACGAGTACATTGGCTCCGCTAGGGCTGATAGCTACTACTCTCTGTACTGTTACTGCCTC |
| | CAAATGTATCTGAGCAAGAACTTCAGCGTGGGCTACCTCATCAACGTGCAAAAGCAGCTG |
| | GAGGAGCACCACACCTACATGAAGGATCTCATGTGGCTGCTCAACATCCCCTTCGCTTACA |
| | ACCTCGCCAGATACAAAAATCTGTCCAACGAAAAACTCTTTTACGACGAGGAAGCCGCCG |
| | CCGAAAAGGCTGACAAGGCTGAGAACGAGAGAGGCGAA (SEQ ID NO: 617) |
| Linker | GGAAGC |
| SV-40 NLS | CCCAAGAAGAAAAGGAAGGTC (SEQ ID NO: 532) |
| Linker | GGCGGAtct (SEQ ID NO: 613) |
| Myc Tag | GAGCAgAAACTGATTAGcGAAGAgGATCTC (SEQ ID NO: 602) |
| WPRE3 | GATAATCAACCTCTGGATTACAAAATTTGTGAAAGATTGACTGGTATTCTTAACTATGTTG |
| | CTCCTTTTACGCTATGTGGATACGCTGCTTTAATGCCTTTGTATCATGCTATTGCTTCCCGTA |
| | TGGCTTTCATTTTCTCCTCCTTGTATAAATCCTGGTTAGTTCTTGCCACGGCGGAACTCATC |
| | GCCGCCTGCCTTGCCCGCTGCTGGACAGGGGCTCGGCTGTTGGGCACTGACAATTCCGTGG |
| | (SEQ ID NO: 603) |
| SV-40 poly A | AACTTGTTTATTGCAGCTTATAATGGTTACAAATAAAGCAATAGCATCACAAATTTCACAA |
| | ATAAAGCATTTTTTTCACTGCATTCTAGTTGTGGTTTGTCCAAACTCATCAATGTATCTTA |
| | (SEQ ID NO: 533) |
| 3′ITR | Aggaacccctagtgatggagttggccactccctctctgcgcgctcgctcgctcactgaggccgggcgaccaaaggtcgccc |
| | gacgcccgggctttgcccgggcggcctcagtgagcgagcgagcgcgcagctgcctgcagg (SEQ ID NO: 600) |

Cas13d: dSeq212 Targeting CUG No Endonuclease (with 1 Point Mutation H298A at HEPN1)

[0160] In some embodiments, the disclosure provides a CUG-targeting catalytically inactive Cas (dCas13d) having an H298A mutation at HEPN1 as set forth in Table R.

TABLE R
Exemplary CUG-Targeting dcas 13d for blocking CUG RNA

| Plasmid | |
|---|---|
| Element | Amino Acid Sequences |
| dCas13d Seq212 | KKKHQSAAEKRQVKKLKNQEKAQKYASEPSPLQSDTAGVECSQKKTVVSHIASSKTLAKAMG |
| H298A | LKSTLVMGDKLVITSFAASKAVGGAGYKSANIEKITDLQGRVIEEHERMFSADVGEKNIELSKN |
| | DCHTNVNNPVVTNIGKDYIGLKSRLEQEFFGKTFENDNLHVQLAYNILDIKKILGTYVNNIIYIF |
| | YNLNRAGTGRDERMYDDLIGTLYAYKPMEAQQTYLLKGDKDMRRFEEVKQLLQNTSAYYVY |
| | YGTLFEKVKAKSKKEQRAKEAEIDACTAHNYDVLRLLSLMRQLCMASVAGTAFKLAESALFN |
| | IEDVLSADLKEILDEAFSGAVNKLNDGFVQHSGNNLYVLQQLYPNETIERIAEKYYRLTVRKED |
| | LNMGVNIKKLRELIVGQYFPEVLDKEYDLSKNGDSVVTYRSKIYTVMNYILLYYLEDHDSSRE |
| | SMVEALRQNREGDEGKEEIYRQFAKKVWNGVSGLFGVCLNLFKTEKRNKFRSKVALPDVSGA |
| | AYMLSSENIDYFVKMLFFVCKFLDGKEINELLCALINKFDNIADILDAAAQCGSSVWFVDSYRF |
| | FERSRRISAQIRIVKNIASKDFKKSKKDSDESYPEQLYLDALALLGDVISKYKQNRDGSVVIDDQ |
| | GNAVLTEQYKRFRYEFFEEIKRDESGGIKYKKSGKPEYNHQRRNFILNNVLKSKWFFYVVKYN |
| | RPSSCRELMKNKEILRFVLRDIPDSQVRRYFKAVQGEEAYASAEAMRTRLVDALSQFSVTACL |
| | DEVGGMTDKEFASQRAVDSKEKLRAIIRLYLTVAYLITKSMVKVNTRFSIAFSVLERDYYLLID |
| | GKKKSSDYTGEDMLALTRKFVGEDAGLYREWKEKNAEAKDKYFDKAERKKVLRQNDKMIR |
| | KMHFTPHSLNYVQKNLESVQSNGLAAVIKEYRNAVAHLNIINRLDEYIGSARADSYYSLYCYC |
| | LQMYLSKNFSVGYLINVQKQLEEHHTYMKDLMWLLNIPFAYNLARYKNLSNEKLFYDEEAAA |
| | EKADKAENERGE (SEQ ID NO: 589) |
| Linker | GS |
| SV-40 NLS | PKKKRKV (SEQ ID NO: 437) |
| Linker | GGS |
| Myc Tag | EQKLISEEDL (SEQ ID NO: 610) |

[0161] In some embodiments, an AAV vector of the disclosure, comprising a CUG-targeting dCas13d protein comprises from 5′ to 3′ the elements as set forth in Table S. In some aspects, the AAV vector comprises the nucleic acid sequence set forth in SEQ ID NO. 596 or 597.

TABLE S
Exemplary AAV vector comprising a CUG-Targeting dCas13d

| Plasmid | |
|---|---|
| Element | Amino Acid Sequences |
| 5′ ITR | Cctgcaggcagctgcgcgctcgctcgctcactgaggccgcccgggcgtcgggcgacctttggtcgcccggcctca |
| | gtgagcgagcgagcgcgcagagagggagtggccaactccatcactaggggttcct (SEQ ID NO: 599) |
| Human U6 | Gagggcctatttcccatgattccttcatatttgcatatacgatacaaggctgttagagagataattggaattaa |
| promoter | tttgactgtaaacacaaagatattagtacaaaatacgtgacgtagaaagtaataatttcttgggtagtttgcagt |
| | tttaaaattatgttttaaaatggactatcatatgcttaccgtaacttgaaagtatttcgatttcttggctttata |
| | tatcttgtggaaaggacgaaacacc (SEQ ID NO: 519) |
| Seq212 direct | Tagccctgcagtaaggcagggttctaagac (SEQ ID NO: 614) |
| repeat (DR) | |
| Spacer (CTG | CAGCAGCAGCAGCAGCAGCAGCAGCA (SEQ ID NO: 459) |
| guide 3) | |
| EFS/UBB | GGGCAGAGCGCACATCGCCCACAGTCCCCGAGAAGTTGGGGGGAGGGGTCGGCAATTGAa |
| promoter | CCGGTGCCTAGAGAAGGTGGCGCGGGGTAAACTGGGAAAGTGATGTCGTGTACTGGCTCC |
| | GCCTTTTTCCCGAGGGTGGGGGAGAACCGTATATAAGTGCAGTAGTCGCCGTGAACGTTCT |
| | TTTTCGCAACGGGTTTGCCGCCAGAACACAGaattccagGTAAGTCCCGCAGCCGTAACGACCT |
| | TGGGGGGGTGTGAGATTCTCATTCTAATTTTGAAGAATATTAGGTGTAAAAGCAAGAAATA |
| | CAATGATCCTGAGGTGACACGCTTATGTTTTACTTTTAAACTAGGT (SEQ ID NO: 609) |
| Kozak Sequence | GCCGCCACCATG (SEQ ID NO: 529) |
| Dead Seq212 | AAGAAGAAGCACCAGAGCGCCGCCGAGAAGAGGCAAGTGAAGAAGCTCAAGAATCAAGA |
| H298A | GAAGGCCCAGAAGTACGCTAGCGAGCCTTCCCCCCTCCAGAGCGATACAGCTGGCGTGGA |
| | ATGCTCCCAGAAAAAGACAGTCGTCAGCCACATTGCCAGCTCCAAGACACTGGCCAAGGC |
| | TATGGGACTCAAATCCACACTGGTCATGGGCGACAAGCTGGTCATCACCAGCTTTGCTGCT |
| | AGCAAGGCTGTCGGAGGCGCTGGCTACAAAAGCGCTAACATTGAAAAAATCACAGATCTG |
| | CAAGGAAGGGTCATTGAGGAGCACGAAAGGATGTTTAGCGCCGATGTCGGAGAGAAAAA |
| | TATCGAACTGAGCAAGAATGACTGCCACACCAACGTCAACAACCCCGTGGTGACCAACAT |
| | CGGAAAGGATTACATCGGACTGAAATCTAGGCTGGAGCAAGAGTTTTTCGGCAAGACATT |
| | CGAGAATGACAATCTGCATGTGCAGCTGGCCTACAATATCCTCGACATCAAGAAAATTCTG |
| | GGAACCTATGTGAACAATATCATTTATATCTTCTACAATCTGAATAGGGCTGGCACCGGCA |
| | GAGATGAGAGGATGTATGACGACCTCATCGGCACACTGTACGCTTACAAACCCATGGAGG |
| | CTCAACAGACCTATCTGCTCAAAGGCGACAAGGATATGAGGAGGTTTGAGGAGGTGAAAC |
| | AGCTGCTGCAAAACACCTCCGCTTACTATGTGTATTACGGCACACTGTTCGAGAAGGTGAA |
| | GGCTAAGAGCAAGAAGGAACAGAGGGCTAAGGAGGCCGAAATCGACGCTTGTACCGCCC |
| | ATAACTACGATGTGCTGAGACTGCTGTCCCTCATGagGCAGCTGTGCATGgcCTCCGTCGCT |
| | GGAACAGCCTTTAAGCTGGCTGAGTCCGCTCTGTTCAACATTGAGGATGTGCTCAGCGCCG |
| | ATCTGAAGGAAATCCTCGATGAAGCCTTCTCCGGCGCCGTGAACAAGCTCAATGACGGATT |
| | CGTGCAGCACTCCGGCAACAATCTGTACGTGCTCCAGCAGCTGTACCCTAATGAGACCATC |
| | GAGAGAATCGCCGAGAAGTACTACAGACTCACCGTGAGGAAGGAGGATCTGAACATGGG |
| | AGTCAACATTAAAAAGCTGAGGGAGCTGATCGTGGGCCAATACTTTCCCGAGGTCCTCGA |
| | CAAAGAATACGACCTCTCCAAGAATGGAGACAGCGTGGTGACATACAGAAGCAAGATTTA |
| | TACCGTGATGAATTACATTCTGCTGTATTACCTCGAGGACCACGACTCCAGCAGAGAAAGC |
| | ATGGTCGAAGCTCTGAGACAAAACAGAGAGGGCGATGAAGGCAAGGAGGAGATCTATAG |
| | ACAGTTTGCCAAGAAGGTGTGGAACGGCGTGTCCGGACTGTTTGGCGTGTGTCTGAACCTC |
| | TTCAAGACCGAAAAGAGAAACAAGTTTAGGAGCAAAGTCGCCCTCCCCGATGTGTCCGGC |
| | GCTGCCTATATGCTCTCCTCCGAGAACATCGACTACTTTGTCAAGATGCTCTTCTTTGTGTG |
| | TAAGTTTCTGGATGGCAAAGAAATCAACGAGCTGCTGTGCGCTCTGATCAACAAATTTGAT |
| | AATATTGCCGATATTCTGGATGCTGCCGCTCAATGTGGCTCCTCCGTCTGGTTCGTGGACA |
| | GCTATAGGTTCTTCGAGAGATCTAGGAGGATTAGCGCCCAGATTAGAATCGTGAAGAACA |
| | TCGCTTCCAAGGATTTTAAGAAATCCAAGAAGGATTCCGATGAGAGCTACCCCGAGCAGC |
| | TGTATCTGGATGCTCTGGCTCTGCTCGGAGACGTCATCTCCAAGTACAAGCAGAATAGAGA |
| | TGGCAGCGTCGTCATCGATGACCAAGGCAATGCCGTGCTGACAGAGCAATACAAGAGGTT |
| | TAGATATGAATTTTTCGAGGAGATCAAGAGGGACGAAAGCGGCGGCATCAAGTACAAGAA |
| | GTCCGGAAAACCCGAGTACAACCATCAGAGAAGGAATTTTATTCTGAATAATGTGCTGAA |
| | AAGCAAATGGTTTTTCTATGTGGTGAAGTACAATAGGCCCAGCAGCTGCAGAGAACTGAT |
| | GAAGAATAAGGAAATTCTGAGGTTCGTGCTGAGAGACATCCCCGACTCCCAAGTGAGAAG |
| | ATACTTTAAGGCCGTCCAAGGAGAGGAAGCTTACGCTAGCGCCGAAGCTATGAGGACAAG |
| | ACTGGTCGACGCTCTGTCCCAATTTAGCGTCACAGCTTGTCTGGATGAAGTGGGCGGCATG |
| | ACAGACAAGGAATTCGCCTCCCAGAGGGCCGTCGATAGCAAAGAAAAACTGAGAGCCATC |
| | ATCAGACTGTATCTGACAGTCGCCTATCTGATTACCAAGAGCATGGTGAAGGTGAATACAA |
| | GGTTTAGCATTGCCTTTAGCGTGCTGGAGAGGGACTACTATCTGCTCATTGACGGCAAGAA |
| | GAAATCCAGCGACTACACCGGAGAGGATATGCTGGCTCTGACCAGAAAATTTGTGGGCGA |
| | AGATGCTGGACTGTATAGAGAGTGGAAAGAGAAGAACGCTGAAGCCAAGGACAAATATTT |
| | TGACAAGGCCGAAAGGAAGAAGGTGCTGAGACAGAACGATAAGATGATCAGAAAGATGC |
| | ACTTCACACCCCACTCCCTCAATTACGTCCAAAAGAATCTCGAAAGCGTCCAGAGCAACGG |
| | ACTGGCCGCCGTCATCAAGGAATATagAAATGCCGTCGCTcaCCTCAATATCATCAATAGAC |
| | TGGACGAGTACATTGGCTCCGCTAGGGCTGATAGCTACTACTCTCTGTACTGTTACTGCCTC |
| | CAAATGTATCTGAGCAAGAACTTCAGCGTGGGCTACCTCATCAACGTGCAAAAGCAGCTG |
| | GAGGAGCACCACACCTACATGAAGGATCTCATGTGGCTGCTCAACATCCCCTTCGCTTACA |
| | ACCTCGCCAGATACAAAAATCTGTCCAACGAAAAACTCTTTTACGACGAGGAAGCCGCCG |
| | CCGAAAAGGCTGACAAGGCTGAGAACGAGAGAGGCGAA (SEQ ID NO: 618) |
| Linker | GGAAGC |
| SV-40 NLS | CCCAAGAAGAAAAGGAAGGTC (SEQ ID NO: 532) |
| Linker | GGCGGAtct |
| Myc Tag | GAGCAgAAACTGATTAGcGAAGAgGATCTC (SEQ ID NO: 602) |
| WPRE3 | GATAATCAACCTCTGGATTACAAAATTTGTGAAAGATTGACTGGTATTCTTAACTATGTTG |
| | CTCCTTTTACGCTATGTGGATACGCTGCTTTAATGCCTTTGTATCATGCTATTGCTTCCCGTA |
| | TGGCTTTCATTTTCTCCTCCTTGTATAAATCCTGGTTAGTTCTTGCCACGGCGGAACTCATC |
| | GCCGCCTGCCTTGCCCGCTGCTGGACAGGGGCTCGGCTGTTGGGCACTGACAATTCCGTGG |
| | (SEQ ID NO: 603) |
| SV-40 poly A | AACTTGTTTATTGCAGCTTATAATGGTTACAAATAAAGCAATAGCATCACAAATTTCACAA |
| | ATAAAGCATTTTTTTCACTGCATTCTAGTTGTGGTTTGTCCAAACTCATCAATGTATCTTA |
| | (SEQ ID NO: 533) |
| 3′ITR | Aggaacccctagtgatggagttggccactccctctctgcgcgctcgctcgctcactgaggccgggcgaccaaag |
| | gtcgcccgacgcccgggctttgcccgggcggcctcagtgagcgagcgagcgcgcagctgcctgcagg (SEQ |
| | ID NO: 600) |

### Guide RNAs for RNA-Guided RNA-Binding Proteins

[0162] The terms guide RNA (gRNA) and single guide RNA (sgRNA) are used interchangeably throughout the disclosure.

[0163] Guide RNAs (gRNAs) of the disclosure may comprise of a spacer sequence and a “direct repeat” (DR) sequence. In some embodiments, a guide RNA is a single guide RNA (sgRNA) comprising a contiguous spacer sequence and DR sequence. In some embodiments, the spacer sequence and the DR sequence are not contiguous. In some embodiments, the gRNA comprises a DR sequence. DR sequences refer to the repetitive sequences in the CRISPR locus (naturally-occurring in a bacterial genome or plasmid) that are interspersed with the spacer sequences. It is well known that one would be able to infer the DR sequence of a corresponding (or cognate) Cas protein if the sequence of the associated CRISPR locus is known. In some embodiments, a guide RNA comprises a direct repeat (DR) sequence and a spacer sequence. In some embodiments, a sequence encoding a guide RNA or single guide RNA of the disclosure comprises or consists of a spacer sequence and a DR sequence, that are separated by a linker sequence. In some embodiments, the linker sequence may comprise or consist of 1, 2, 3, 4, 5, 6, 7, 8, 9, 10, 15, 20, 25, 30, 35, 40, 45, 50 or any number of nucleotides (nt) in between. In some embodiments, the linker sequence may comprise at least 1, 2, 3, 4, 5, 6, 7, 8, 9, 10, 15, 20, 25, 30, 35, 40, 45, 50 or any number of nucleotides in between. In some embodiments, the DR sequence is a Cas13d DR sequence.

[0164] In one embodiment, the gRNA that hybridizes with the one or more target RNA molecules in a Cas13d-mediated manner includes one or more direct repeat (DR) sequences, one or more spacer sequences, such as, e.g., one or more sequences comprising an array of DR-spacer-DR-spacer. In one embodiment, a plurality of gRNAs are generated from a single array, wherein each gRNA can be different, for example target different RNAs or target multiple regions of a single RNA, or combinations thereof. In some embodiments, an isolated gRNA includes one or more direct repeat sequences, such as an unprocessed (e.g., about 36 nt) or processed DR (e.g., about 30 nt). In some embodiments, a gRNA can further include one or more spacer sequences specific for (e.g., is complementary to) the target RNA. In certain such embodiments, multiple polIII promoters can be used to drive multiple gRNAs, spacers and/or DRs. In one embodiment, a guide array comprises a DR (about 36nt)-spacer (about 30nt)-DR (about 36nt)-spacer (about 30nt).

[0165] Guide RNAs (gRNAs) of the disclosure may comprise non-naturally occurring nucleotides. In some embodiments, a guide RNA of the disclosure or a sequence encoding the guide RNA comprises or consists of modified or synthetic RNA nucleotides. Exemplary modified RNA nucleotides include, but are not limited to, pseudouridine (Ψ), dihydrouridine (D), inosine (I), and 7-methylguanosine (m7G), hypoxanthine, xanthine, xanthosine, 7-methylguanine, 5,6-Dihydrouracil, 5-methylcytosine, 5-methylcytidine, 5-hydropxymethylcytosine, isoguanine, and isocytosine.

[0166] Guide RNAs (gRNAs) of the disclosure may bind modified RNA within a target sequence. Within a target sequence, guide RNAs (gRNAs) of the disclosure may bind modified or mutated (e.g., pathogenic) RNA. Exemplary epigenetically or post-transcriptionally modified RNA include, but are not limited to, 2′-O-Methylation (2′-OMe) (2′-O-methylation occurs on the oxygen of the free 2′-OH of the ribose moiety), N6-methyladenosine (m6A), and 5-methylcytosine (m5C).

[0167] In some embodiments of the compositions of the disclosure, a guide RNA of the disclosure comprises at least one sequence encoding a non-coding C/D box small nucleolar RNA (snoRNA) sequence. In some embodiments, the snoRNA sequence comprises at least one sequence that is complementary to the target RNA, wherein the target sequence of the RNA molecule comprises at least one 2′-OMe. In some embodiments, the snoRNA sequence comprises at least one sequence that is complementary to the target RNA, wherein the at least one sequence that is complementary to the target RNA comprises a box C motif (RUGAUGA) (SEQ ID NO: 523) and a box D motif (CUGA) (SEQ ID NO: 524).

[0168] Spacer sequences of the disclosure bind to the target sequence of an RNA molecule. In some embodiments, spacer sequences of the disclosure bind to pathogenic target RNA.

[0169] In some embodiments of the compositions of the disclosure, the sequence comprising the gRNA further comprises a spacer sequence that specifically binds to the target RNA sequence. In some embodiments, the spacer sequence has at least 50%, 55%, 60%, 65%, 70%, 75%, 80%, 87%, 90%, 95%, 97%, 99% or any percentage in between of complementarity to the target RNA sequence. In some embodiments, the spacer sequence has 100% complementarity to the target RNA sequence. In some embodiments, the spacer sequence comprises or consists of 20 nucleotides. In some embodiments, the spacer sequence comprises or consists of 21 nucleotides, 22 nucleotides, 23 nucleotides, 24 nucleotides, 25 nucleotides, 26 nucleotides, 27 nucleotides, 28 nucleotides, or 29 nucleotides. In some embodiments, the spacer sequence comprises or consists of 26 nucleotides. In some embodiments, the spacer sequence is non-processed and comprises or consists of 30 nucleotides. In some embodiments the non-processed spacer sequence comprises or consists of 30-36 nucleotides.

[0170] DR sequences of the disclosure bind the Cas polypeptide of the disclosure. Upon binding of the spacer sequence of the gRNA to the target RNA sequence, the Cas protein bound to the DR sequence of the gRNA is positioned at the target RNA sequence. DR sequence having sufficient complementarity to its cognate Cas protein, or nucleic acid thereof, binds selectively to the target nucleic acid sequence of the Cas protein and has at least 50%, 55%, 60%, 65%, 70%, 75%, 80%, 85%, 90%, 95%, 96, 97%, 98%, 99%, or any percentage identity in between to the sequence. In some embodiments, a sequence having sufficient complementarity has 100% identity. In some embodiments, DR sequences of the disclosure comprise a secondary structure or a tertiary structure. Exemplary secondary structures include, but are not limited to, a helix, a stem loop, a bulge, a tetraloop and a pseudoknot. Exemplary tertiary structures include, but are not limited to, an A-form of a helix, a B-form of a helix, and a Z-form of a helix. Exemplary tertiary structures include, but are not limited to, a twisted or helicized stem loop. Exemplary tertiary structures include, but are not limited to, a twisted or helicized pseudoknot. In some embodiments, DR sequences of the disclosure comprise at least one secondary structure or at least one tertiary structure. In some embodiments, DR sequences of the disclosure comprise one or more secondary structure(s) or one or more tertiary structure(s).

[0171] In some embodiments of the compositions of the disclosure, a guide RNA or a portion thereof selectively binds to a tetraloop motif in an RNA molecule of the disclosure. In some embodiments, a target sequence of an RNA molecule comprises a tetraloop motif. In some embodiments, the tetraloop motif is a “GRNA” motif comprising or consisting of one or more of the sequences of GAAA, GUGA, GCAA or GAGA.

[0172] In some embodiments of the compositions of the disclosure, a guide RNA or a portion thereof that binds to a target sequence of an RNA molecule hybridizes to the target sequence of the RNA molecule. In some embodiments, a guide RNA or a portion thereof that binds to a first RNA binding protein or to a second RNA binding protein covalently binds to the first RNA binding protein or to the second RNA binding protein. In some embodiments, a guide RNA or a portion thereof that binds to a first RNA binding protein or to a second RNA binding protein non-covalently binds to the first RNA binding protein or to the second RNA binding protein.

[0173] In some embodiments of the compositions of the disclosure, a guide RNA or a portion thereof comprises or consists of between 10 and 100 nucleotides, inclusive of the endpoints. In some embodiments, a spacer sequence of the disclosure comprises or consists of between 10 and 30 nucleotides, inclusive of the endpoints. In some embodiments, a spacer sequence of the disclosure comprises or consists of 15, 16, 17, 18, 19, 20, 21, 22, 23, 24, 25, 26, 27, 28, 29 or 30 nucleotides. In some embodiments, the spacer sequence of the disclosure comprises or consists of 20 nucleotides. In some embodiments, the spacer sequence of the disclosure comprises or consists of 21 nucleotides. In some embodiments, the spacer sequence of the disclosure comprises or consists of 26 nucleotides.

[0174] Guide molecules generally exist in various states of processing. In one example, an unprocessed guide RNA is 36nt of DR followed by 30-32 nt of spacer. The guide RNA is processed (truncated/modified) by Cas13d itself or other RNases into the shorter “mature” form. In some embodiments, an unprocessed guide sequence is about, or at least about 30, 35, 40, 45, 50, 55, 60, 61, 62, 63, 64, 65, 66, 67, 68, 69, 70, 71, 72, 73, 74, 75, or more nucleotides (nt) in length. In some embodiments, a processed guide sequence is about 44 to 60 nt (such as 40, 41, 42, 43, 44, 45, 46, 47, 48, 49, 50, 51, 52, 53, 54, 55, 56, 57, 58, 59, 60, 61, 62, 63, 64, 65, 66, 67, 68, 69, or 70 nt). In some embodiments, an unprocessed spacer is about 28-32 nt long (such as 25, 26, 27, 28, 29, 30, 31, 32, 33, 34, or 35 nt) while the mature (processed) spacer can be about 10 to 30 nt, 10 to 25 nt, 14 to 25 nt, 20 to 22 nt, or 14-30 nt (such as 10, 11, 12, 13, 14, 15, 16, 17, 18, 19, 20, 21, 22, 23, 24, 25, 26, 27, 28, 29, 30, 31, 32, 33, 34, or 35 nt). In some embodiments, an unprocessed DR is about 36 nt (such as 30, 31, 32, 33, 34, 35, 36, 37, 38, 39, 40 or 41 nt), while the processed DR is about 30 nt (such as 25, 26, 27, 28, 29, 30, 31, 32, 33, 34, or 35 nt). In some embodiments, a DR sequence is truncated by 1-10 nucleotides (such as 1, 2, 3, 4, 5, 6, 7, 8, 9, to 10 nucleotides at e.g., the 5′ end in order to be expressed as mature pre-processed guide RNAs.

[0175] In some embodiments of the compositions of the disclosure, a guide RNA or a portion thereof does not comprise a nuclear localization sequence (NLS).

[0176] In some embodiments of the compositions of the disclosure, a guide RNA or a portion thereof comprises a sequence complementary to a protospacer flanking sequence (PFS). In some embodiments, including those wherein a guide RNA or a portion thereof comprises a sequence complementary to a PFS, the first RNA binding protein may comprise a sequence isolated or derived from a Cas13 protein. In some embodiments, including those wherein a guide RNA or a portion thereof comprises a sequence complementary to a PFS, the first RNA binding protein may comprise a sequence encoding a Cas13 protein or an RNA-binding portion thereof In some embodiments, the guide RNA or a portion thereof does not comprise a sequence complementary to a PFS.

[0177] In some embodiments of the compositions of the disclosure, guide RNA sequence of the disclosure comprises a promoter sequence to drive expression of the guide RNA. In some embodiments, a vector comprising a guide RNA sequence of the disclosure comprises a promoter sequence to drive expression of the guide RNA. In some embodiments, the promoter to drive expression of the guide RNA is a constitutive promoter. In some embodiments, the promoter sequence is an inducible promoter. In some embodiments, the promoter is a sequence which is a tissue-specific and/or cell-type specific promoter. In some embodiments, the promoter is a hybrid or a recombinant promoter. In some embodiments, the promoter is a promoter capable of expressing the guide RNA in a mammalian cell. In some embodiments, the promoter is a promoter capable of expressing the guide RNA in a human cell. In some embodiments, the promoter is a promoter capable of expressing the guide RNA and restricting the guide RNA to the nucleus of the cell. In some embodiments, the promoter is a human RNA polymerase promoter or a sequence isolated or derived from a sequence encoding a human RNA polymerase promoter. In some embodiments, the promoter is a U6 promoter or a sequence isolated or derived from a sequence encoding a U6 promoter. In some embodiments, the U6 promoter is a human U6 promoter. In some embodiments, the promoter is a human tRNA promoter or a sequence isolated or derived from a sequence encoding a human tRNA promoter. In some embodiments, the promoter is a human valine tRNA promoter or a sequence isolated or derived from a sequence encoding a human valine tRNA promoter.

[0178] In some embodiments of the compositions of the disclosure, a promoter to drive expression of the guide RNA further comprises a regulatory element. In some embodiments, a vector comprising a promoter sequence to drive expression of the guide RNA further comprises a regulatory element. In some embodiments, a regulatory element enhances expression of the guide RNA. Exemplary regulatory elements include, but are not limited to, an enhancer element, an intron, an exon, or a combination thereof.

In some embodiments of the compositions of the disclosure, a vector of the disclosure comprises one or more of a sequence encoding a guide RNA, a promoter sequence to drive expression of the guide RNA and a sequence encoding a regulatory element. In some embodiments of the compositions of the disclosure, the vector further comprises a sequence encoding a fusion protein of the disclosure.

### RNA-Guided RNA-Binding Proteins

[0179] In some embodiments of the compositions of the disclosure, gRNAs correspond to target RNA molecules and an RNA-guided RNA binding protein. In some embodiments, the gRNAs correspond to an RNA-guided RNA binding fusion protein, wherein the fusion protein comprises first and second RNA binding proteins. In some embodiments, the first RNA-binding protein in the fusion protein is a deactivated RNA-binding protein, e.g., a deactivated Cas or catalytically dead Cas protein. In some embodiments, along a sequence encoding the RNA-binding fusion protein, the sequence encoding the first RNA binding protein is positioned 5′ of the sequence encoding the second RNA binding protein. In some embodiments, along a sequence encoding the fusion protein, the sequence encoding the first RNA binding protein is positioned 3′ of the sequence encoding the second RNA binding protein.

[0180] In some embodiments of the compositions of the disclosure, the sequence encoding the first RNA binding protein comprises a sequence isolated or derived from a protein capable of binding an RNA molecule. In some embodiments, the sequence encoding the first RNA binding protein comprises a sequence isolated or derived from a protein capable of selectively binding an RNA molecule and not binding a DNA molecule, a mammalian DNA molecule or any DNA molecule. In some embodiments, the sequence encoding the first RNA binding protein comprises a sequence isolated or derived from a protein capable of binding an RNA molecule and inducing a break in the RNA molecule. In some embodiments, the sequence encoding the first RNA binding protein comprises a sequence isolated or derived from a protein capable of binding an RNA molecule, inducing a break in the RNA molecule, and not binding a DNA molecule, a mammalian DNA molecule or any DNA molecule. In some embodiments, the sequence encoding the first RNA binding protein comprises a sequence isolated or derived from a protein capable of binding an RNA molecule, inducing a break in the RNA molecule, and neither binding nor inducing a break in a DNA molecule, a mammalian DNA molecule or any DNA molecule.

[0181] In some embodiments of the compositions of the disclosure, the sequence encoding the first RNA-guided RNA binding protein comprises a sequence isolated or derived from a protein with no DNA nuclease activity.

[0182] In some embodiments of the compositions of the disclosure, the sequence encoding the RNA-guided RNA binding protein disclosed herein comprises a sequence isolated or derived from a CRISPR Cas protein. In some embodiments, the CRISPR Cas protein is not a Type II CRISPR Cas protein. In some embodiments, the CRISPR Cas protein is not a Cas9 protein.

[0183] In some embodiments of the compositions of the disclosure, the sequence encoding the RNA-guided RNA binding protein comprises a Type VI CRISPR Cas protein or portion thereof In some embodiments, the Type VI CRISPR Cas protein comprises a Cas13 protein or portion thereof. Exemplary Cas13 proteins of the disclosure may be isolated or derived from any species, including, but not limited to, bacteria or archaea. Exemplary Cas13 proteins of the disclosure may be isolated or derived from any species, including, but not limited to, Leptotrichia wadei, Listeria seeligeri serovar 1/2b (strain ATCC 35967/DSM 20751/CIP 100100/SLCC 3954), Lachnospiraceae bacterium, Clostridium aminophilum DSM 10710, Carnobacterium gallinarum DSM 4847, Paludibacter propionicigenes WB4, Listeria weihenstephanensis FSL R9-0317, Listeria weihenstephanensis FSL R9-0317, bacterium FSL M6-0635 (Listeria newyorkensis), Leptotrichia wadei F0279, Rhodobacter capsulatus SB 1003, Rhodobacter capsulatus R121, Rhodobacter capsulatus DE442 and Corynebacterium ulcerans. Exemplary Cas13 proteins of the disclosure may be DNA nuclease inactivated. Exemplary Cas13 proteins of the disclosure include, but are not limited to, Cas13a, Cas13b, Cas13c, Cas13d and orthologs thereof Exemplary Cas13b proteins of the disclosure include, but are not limited to, subtypes 1 and 2 referred to herein as Csx27 and Csx28, respectively.

[0184] Exemplary Cas13a proteins include, but are not limited to:

| Cas13a | Cas13a | | | |
|---|---|---|---|---|
| number | abbreviation | Organism name | Accession number | Direct Repeat sequence |
| Cas13a1 | LshCas13a | Leptotrichia | WP_018451595.1 | CCACCCCAATATCGAAGGGGACTAA |
| | | shahii | | AAC (SEQ ID NO: 393) |
| Cas13a2 | LwaCas13a | Leptotrichia | WP_021746774.1 | GATTTAGACTACCCCAAAAACGAAG |
| | | wadei | | GGGACTAAAAC (SEQ ID NO: |
| | | | | 394) |
| Cas13a3 | LseCas13a | Listeria | WP_012985477.1 | GTAAGAGACTACCTCTATATGAAAG |
| | | seeligeri | | AGGACTAAAAC (SEQ ID NO: |
| | | | | 395) |
| Cas13a4 | LbmCas13a | Lachnospiraceae | WP_044921188.1 | GTATTGAGAAAAGCCAGATATAGTT |
| | | bacterium | | GGCAATAGAC (SEQ ID NO: 396) |
| | | MA2020 | | |
| Cas13a5 | LbnCas13a | Lachnospiraceae | WP_022785443.1 | GTTGATGAGAAGAGCCCAAGATAG |
| | | bacterium | | AGGGCAATAAC (SEQ ID NO: |
| | | NK4A179 | | 397) |
| Cas13a6 | CamCas13a | [Clostridium] | WP_031473346.1 | GTCTATTGCCCTCTATATCGGGCTGT |
| | | aminophilum | | TCTCCAAAC (SEQ ID NO: 398) |
| | | DSM 10710 | | |
| Cas13a7 | CgaCas13a | Carnobacterium | WP_034560163.1 | ATTAAAGACTACCTCTAAATGTAAG |
| | | gallinarum DSM | | AGGACTATAAC (SEQ ID NO: |
| | | 4847 | | 399) |
| Cas13a8 | Cga2Cas13a | Carnobacterium | WP_034563842.1 | AATATAAACTACCTCTAAATGTAAG |
| | | gallinarum DSM | | AGGACTATAAC (SEQ ID NO: |
| | | 4847 | | 400) |
| Cas13a9 | Pprcas13a | Paludibacter | WP_013443710.1 | CTTGTGGATTATCCCAAAATTGAAG |
| | | propionicigenes | | GGAACTACAAC (SEQ ID NO: |
| | | WB4 | | 401) |
| Cas13a10 | LweCas13a | Listeria | WP_036059185.1 | GATTTAGAGTACCTCAAAATAGAAG |
| | | weihenstephanensis | | AGGTCTAAAAC (SEQ ID NO: |
| | | FSL R9-0317 | | 402) |
| Cas13a11 | LbfCas13a | Listeriaceae | WP_036091002.1 | GATTTAGAGTACCTCAAAACAAAAG |
| | | bacterium FSL | | AGGACTAAAAC (SEQ ID NO: |
| | | M6-0635 | | 403) |
| | | (Listeria | | |
| | | newyorkensis) | | |
| Cas13a12 | Lwa2cas13a | Leptotrichia | WP_021746774.1 | GATATAGATAACCCCAAAAACGAA |
| | | wadei F0279 | | GGGATCTAAAAC (SEQ ID NO: |
| | | | | 404) |
| Cas13a13 | RcsCas13a | Rhodobacter | WP_013067728.1 | GCCTCACATCACCGCCAAGACGACG |
| | | capsulatus SB | | GCGGACTGAAC (SEQ ID NO: 405) |
| | | 1003 | | |
| Cas13a14 | RcrCas13a | Rhodobacter | WP_023911507.1 | GCCTCACATCACCGCCAAGACGACG |
| | | capsulatus R121 | | GCGGACTGAAC (SEQ ID NO: |
| | | | | 406) |
| Cas13a15 | RcdCas13a | Rhodobacter | WP_023911507.1 | GCCTCACATCACCGCCAAGACGACG |
| | | capsulatus | | GCGGACTGAAC (SEQ ID NO: |
| | | DE442 | | 407) |

[0185] Exemplary wild type Cas13a proteins of the disclosure may comprise or consist of the amino acid sequence of SEQ ID NO: 408.

[0186] Exemplary Cas13b proteins include, but are not limited to:

| Species | Cas13b Accession | Cas13b Size (aa) |
|---|---|---|
| Paludibacter propionicigenes WB4 | WP_013446107.1 | 1155 |
| Prevotella sp. P5-60 | WP_044074780.1 | 1091 |
| Prevotella sp. P4-76 | WP_044072147.1 | 1091 |
| Prevotella sp. P5-125 | WP_044065294.1 | 1091 |
| Prevotella sp. P5-119 | WP_042518169.1 | 1091 |
| Capnocytophaga canimorsus Cc5 | WP_013997271.1 | 1200 |
| Phaeodactylibacter xiamenensis | WP_044218239.1 | 1132 |
| Porphyromonas gingivalis W83 | WP_005873511.1 | 1136 |
| Porphyromonas gingivalis F0570 | WP_021665475.1 | 1136 |
| Porphyromonas gingivalis ATCC 33277 | WP_012458151.1 | 1136 |
| Porphyromonas gingivalis F0185 | ERJ81987.1 | 1136 |
| Porphyromonas gingivalis F0185 | WP_021677657.1 | 1136 |
| Porphyromonas gingivalis SJD2 | WP_023846767.1 | 1136 |
| Porphyromonas gingivalis F0568 | ERJ65637.1 | 1136 |
| Porphyromonas gingivalis W4087 | ERJ87335.1 | 1136 |
| Porphyromonas gingivalis W4087 | WP_021680012.1 | 1136 |
| Porphyromonas gingivalis F0568 | WP_021663197.1 | 1136 |
| Porphyromonas gingivalis | WP_061156637.1 | 1136 |
| Porphyromonas gulae | WP_039445055.1 | 1136 |
| Bacteroides pyogenes F0041 | ERI81700.1 | 1116 |
| Bacteroides pyogenes JCM 10003 | WP_034542281.1 | 1116 |
| Alistipes sp. ZOR0009 | WP_047447901.1 | 954 |
| Flavobacterium branchiophilum FL-15 | WP_014084666.1 | 1151 |
| Prevotella sp. MA2016 | WP_036929175.1 | 1323 |
| Myroides odoratimimus CCUG 10230 | EHO06562.1 | 1160 |
| Myroides odoratimimus CCUG 3837 | EKB06014.1 | 1158 |
| Myroides odoratimimus CCUG 3837 | WP_006265509.1 | 1158 |
| Myroides odoratimimus CCUG 12901 | WP_006261414.1 | 1158 |
| Myroides odoratimimus CCUG 12901 | EHO08761.1 | 1158 |
| Myroides odoratimimus (NZ_CP013690.1) | WP_058700060.1 | 1160 |
| Bergeyella zoohelcum ATCC 43767 | EKB54193.1 | 1225 |
| Capnocytophaga cynodegmi | WP_041989581.1 | 1219 |
| Bergeyella zoohelcum ATCC 43767 | WP_002664492.1 | 1225 |
| Flavobacterium sp. 316 | WP_045968377.1 | 1156 |
| Psychroflexus torquis ATCC 700755 | WP_015024765.1 | 1146 |
| Flavobacterium columnare ATCC 49512 | WP_014165541.1 | 1180 |
| Flavobacterium columnare | WP_060381855.1 | 1214 |
| Flavobacterium columnare | WP_063744070.1 | 1214 |
| Flavobacterium columnare | WP_065213424.1 | 1215 |
| Chryseobacterium sp. YR477 | WP_047431796.1 | 1146 |
| Riemerella anatipestifer ATCC 11845 = DSM | WP_004919755.1 | 1096 |
| 15868 | | |
| Riemerella anatipestifer RA-CH-2 | WP_015345620.1 | 949 |
| Riemerella anatipestifer | WP_049354263.1 | 949 |
| Riemerella anatipestifer | WP_061710138.1 | 951 |
| Riemerella anatipestifer | WP_064970887.1 | 1096 |
| Prevotella saccharolytica F0055 | EKY00089.1 | 1151 |
| Prevotella saccharolytica JCM 17484 | WP_051522484.1 | 1152 |
| Prevotella buccae ATCC 33574 | EFU31981.1 | 1128 |
| Prevotella buccae ATCC 33574 | WP_004343973.1 | 1128 |
| Prevotella buccae D17 | WP_004343581.1 | 1128 |
| Prevotella sp. MSX73 | WP_007412163.1 | 1128 |
| Prevotella pallens ATCC 700821 | EGQ18444.1 | 1126 |
| Prevotella pallens ATCC 700821 | WP_006044833.1 | 1126 |
| Prevotella intermedia ATCC 25611 = DSM 20706 | WP_036860899.1 | 1127 |
| Prevotella intermedia | WP_061868553.1 | 1121 |
| Prevotella intermedia 17 | AFJ07523.1 | 1135 |
| Prevotella intermedia | WP_050955369.1 | 1133 |
| Prevotella intermedia | BAU18623.1 | 1134 |
| Prevotella intermedia ZT | KJJ86756.1 | 1126 |
| Prevotella aurantiaca JCM 15754 | WP_025000926.1 | 1125 |
| Prevotella pleuritidis F0068 | WP_021584635.1 | 1140 |
| Prevotella pleuritidis JCM 14110 | WP_036931485.1 | 1117 |
| Prevotella falsenii DSM 22864 = JCM 15124 | WP_036884929.1 | 1134 |
| Porphyromonas gulae | WP_039418912.1 | 1176 |
| Porphyromonas sp. COT-052 OH4946 | WP_039428968.1 | 1176 |
| Porphyromonas gulae | WP_039442171.1 | 1175 |
| Porphyromonas gulae | WP_039431778.1 | 1176 |
| Porphyromonas gulae | WP_046201018.1 | 1176 |
| Porphyromonas gulae | WP_039434803.1 | 1176 |
| Porphyromonas gulae | WP_039419792.1 | 1120 |
| Porphyromonas gulae | WP_039426176.1 | 1120 |
| Porphyromonas gulae | WP_039437199.1 | 1120 |
| Porphyromonas gingivalis TDC60 | WP_013816155.1 | 1120 |
| Porphyromonas gingivalis ATCC 33277 | WP_012458414.1 | 1120 |
| Porphyromonas gingivalis A7A1-28 | WP_058019250.1 | 1176 |
| Porphyromonas gingivalis JCVI SC001 | EOA10535.1 | 1176 |
| Porphyromonas gingivalis W50 | WP_005874195.1 | 1176 |
| Porphyromonas gingivalis | WP_052912312.1 | 1176 |
| Porphyromonas gingivalis AJW4 | WP_053444417.1 | 1120 |
| Porphyromonas gingivalis | WP_039417390.1 | 1120 |
| Porphyromonas gingivalis | WP_061156470.1 | 1120 |

[0187] Exemplary wild type Bergeyella zoohelcum ATCC 43767 Cas13b (BzCas13b) proteins of the disclosure may comprise or consist of the amino acid sequence of SEQ ID NO: 409.

[0188] In some embodiments of the compositions of the disclosure, the sequence encoding the RNA binding protein comprises a sequence isolated or derived from a Cas13d protein. Cas13d is an effector of the type VI-D CRISPR-Cas systems. In some embodiments, the Cas13d protein is an RNA-guided RNA endonuclease enzyme that can cut or bind RNA. In some embodiments, the Cas13d protein can include one or more higher eukaryotes and prokaryotes nucleotide-binding (HEPN) domains. In some embodiments, the Cas13d protein can include either a wild-type or mutated HEPN domain. In some embodiments, the Cas13d protein includes a mutated HEPN domain that cannot cut RNA but can process guide RNA. In some embodiments, the Cas13d protein does not require a protospacer flanking sequence. Also see WO Publication No. WO2019/040664 & US2019/0062724, which is incorporated herein by reference in its entirety, for further examples and sequences of Cas13d protein, without limitation.

[0189] In some embodiments, Cas13d sequences of the disclosure include without limitation SEQ ID NOS: 1-296 of WO 2019/040664, so numbered herein and included herewith.

[0190] SEQ ID NO: 1 is an exemplary Cas13d sequence from Eubacterium siraeum containing a HEPN site.

[0191] SEQ ID NO: 2 is an exemplary Cas13d sequence from Eubacterium siraeum containing a mutated HEPN site.

[0192] SEQ ID NO: 3 is an exemplary Cas13d sequence from uncultured Ruminococcus sp. containing a HEPN site.

[0193] SEQ ID NO: 4 is an exemplary Cas13d sequence from uncultured Ruminococcus sp. containing a mutated HEPN site.

[0194] SEQ ID NO: 5 is an exemplary Cas13d sequence from Gut_metagenome_contig2791000549.

[0195] SEQ ID NO: 6 is an exemplary Cas13d sequence from Gut_metagenome_contig855000317

[0196] SEQ ID NO: 7 is an exemplary Cas13d sequence from Gut_metagenome_contig3389000027.

[0197] SEQ ID NO: 8 is an exemplary Cas13d sequence from Gut_metagenome_contig8061000170.

[0198] SEQ ID NO: 9 is an exemplary Cas13d sequence from Gut_metagenome_contig1509000299.

[0199] SEQ ID NO: 10 is an exemplary Cas13d sequence from Gut_metagenome_contig9549000591.

[0200] SEQ ID NO: 11 is an exemplary Cas13d sequence from Gut_metagenome_contig71000500.

[0201] SEQ ID NO: 12 is an exemplary Cas13d sequence from human gut metagenome.

[0202] SEQ ID NO: 13 is an exemplary Cas13d sequence from Gut_metagenome_contig3915000357.

[0203] SEQ ID NO: 14 is an exemplary Cas13d sequence from Gut_metagenome_contig4719000173.

[0204] SEQ ID NO: 15 is an exemplary Cas13d sequence from Gut_metagenome_contig6929000468.

[0205] SEQ ID NO: 16 is an exemplary Cas13d sequence from Gut_metagenome_contig7367000486.

[0206] SEQ ID NO: 17 is an exemplary Cas13d sequence from Gut_metagenome_contig7930000403.

[0207] SEQ ID NO: 18 is an exemplary Cas13d sequence from Gut_metagenome_contig993000527.

[0208] SEQ ID NO: 19 is an exemplary Cas13d sequence from Gut_metagenome_contig6552000639.

[0209] SEQ ID NO: 20 is an exemplary Cas13d sequence from Gut_metagenome_contig11932000246.

[0210] SEQ ID NO: 21 is an exemplary Cas13d sequence from Gut_metagenome_contig12963000286.

[0211] SEQ ID NO: 22 is an exemplary Cas13d sequence from Gut_metagenome_contig2952000470.

[0212] SEQ ID NO: 23 is an exemplary Cas13d sequence from Gut_metagenome_contig451000394.

[0213] SEQ ID NO: 24 is an exemplary Cas13d sequence from Eubacterium_siraeum_DSM_15702.

[0214] SEQ ID NO: 25 is an exemplary Cas13d sequence from gut_metagenome_P19E0k2120140920,_c369000003.

[0215] SEQ ID NO: 26 is an exemplary Cas13d sequence from Gut_metagenome_contig7593000362.

[0216] SEQ ID NO: 27 is an exemplary Cas13d sequence from Gut_metagenome_contig12619000055.

[0217] SEQ ID NO: 28 is an exemplary Cas13d sequence from Gut_metagenome_contig1405000151.

[0218] SEQ ID NO: 29 is an exemplary Cas13d sequence from Chicken_gut_metagenome_c298474.

[0219] SEQ ID NO: 30 is an exemplary Cas13d sequence from Gut_metagenome_contig1516000227.

[0220] SEQ ID NO: 31 is an exemplary Cas13d sequence from Gut_metagenome_contig1838000319.

[0221] SEQ ID NO: 32 is an exemplary Cas13d sequence from Gut_metagenome_contig13123000268.

[0222] SEQ ID NO: 33 is an exemplary Cas13d sequence from Gut_metagenome_contig5294000434.

[0223] SEQ ID NO: 34 is an exemplary Cas13d sequence from Gut_metagenome_contig6415000192.

[0224] SEQ ID NO: 35 is an exemplary Cas13d sequence from Gut_metagenome_contig6144000300.

[0225] SEQ ID NO: 36 is an exemplary Cas13d sequence from Gut_metagenome_contig9118000041.

[0226] SEQ ID NO: 37 is an exemplary Cas13d sequence from Activated_sludge_metagenome_transcript_124486.

[0227] SEQ ID NO: 38 is an exemplary Cas13d sequence from Gut_metagenome_contig1322000437.

[0228] SEQ ID NO: 39 is an exemplary Cas13d sequence from Gut_metagenome_contig4582000531.

[0229] SEQ ID NO: 40 is an exemplary Cas13d sequence from Gut_metagenome_contig9190000283.

[0230] SEQ ID NO: 41 is an exemplary Cas13d sequence from Gut_metagenome_contig1709000510.

[0231] SEQ ID NO: 42 is an exemplary Cas13d sequence from M24_(LSQX01212483_Anaerobic_digester_metagenome) with a HEPN domain.

[0232] SEQ ID NO: 43 is an exemplary Cas13d sequence from Gut_metagenome_contig3833000494.

[0233] SEQ ID NO: 44 is an exemplary Cas13d sequence from Activated_sludge_metagenome_transcript_117355.

[0234] SEQ ID NO: 45 is an exemplary Cas13d sequence from Gut_metagenome_contig11061000330.

[0235] SEQ ID NO: 46 is an exemplary Cas13d sequence from Gut_metagenome_contig338000322 from sheep gut metagenome.

[0236] SEQ ID NO: 47 is an exemplary Cas13d sequence from human gut metagenome.

[0237] SEQ ID NO: 48 is an exemplary Cas13d sequence from Gut_metagenome_contig9530000097.

[0238] SEQ ID NO: 49 is an exemplary Cas13d sequence from Gut_metagenome_contig1750000258.

[0239] SEQ ID NO: 50 is an exemplary Cas13d sequence from Gut_metagenome_contig5377000274.

[0240] SEQ ID NO: 51 is an exemplary Cas13d sequence from gut_metagenome_P19E0k2120140920_c248000089.

[0241] SEQ ID NO: 52 is an exemplary Cas13d sequence from Gut_metagenome_contig11400000031.

[0242] SEQ ID NO: 53 is an exemplary Cas13d sequence from Gut_metagenome_contig7940000191.

[0243] SEQ ID NO: 54 is an exemplary Cas13d sequence from Gut_metagenome_contig6049000251.

[0244] SEQ ID NO: 55 is an exemplary Cas13d sequence from Gut_metagenome_contig1137000500.

[0245] SEQ ID NO: 56 is an exemplary Cas13d sequence from Gut_metagenome_contig9368000105.

[0246] SEQ ID NO: 57 is an exemplary Cas13d sequence from Gut_metagenome_contig546000275.

[0247] SEQ ID NO: 58 is an exemplary Cas13d sequence from Gut_metagenome_contig7216000573.

[0248] SEQ ID NO: 59 is an exemplary Cas13d sequence from Gut_metagenome_contig4806000409.

[0249] SEQ ID NO: 60 is an exemplary Cas13d sequence from Gut_metagenome_contig10762000480.

[0250] SEQ ID NO: 61 is an exemplary Cas13d sequence from Gut_metagenome_contig4114000374.

[0251] SEQ ID NO: 62 is an exemplary Cas13d sequence from Ruminococcus_flavefaciens_FD1.

[0252] SEQ ID NO: 63 is an exemplary Cas13d sequence from Gut_metagenome_contig7093000170.

[0253] SEQ ID NO: 64 is an exemplary Cas13d sequence from Gut_metagenome_contig11113000384.

[0254] SEQ ID NO: 65 is an exemplary Cas13d sequence from Gut_metagenome_contig6403000259.

[0255] SEQ ID NO: 66 is an exemplary Cas13d sequence from Gut_metagenome_contig6193000124.

[0256] SEQ ID NO: 67 is an exemplary Cas13d sequence from Gut_metagenome_contig721000619.

[0257] SEQ ID NO: 68 is an exemplary Cas13d sequence from Gut_metagenome_contig1666000270.

[0258] SEQ ID NO: 69 is an exemplary Cas13d sequence from Gut_metagenome_contig2002000411.

[0259] SEQ ID NO: 70 is an exemplary Cas13d sequence from Ruminococcus albus.

[0260] SEQ ID NO: 71 is an exemplary Cas13d sequence from Gut_metagenome_contig13552000311.

[0261] SEQ ID NO: 72 is an exemplary Cas13d sequence from Gut_metagenome_contig10037000527.

[0262] SEQ ID NO: 73 is an exemplary Cas13d sequence from Gut_metagenome_contig238000329.

[0263] SEQ ID NO: 74 is an exemplary Cas13d sequence from Gut_metagenome_contig2643000492.

[0264] SEQ ID NO: 75 is an exemplary Cas13d sequence from Gut_metagenome_contig874000057.

[0265] SEQ ID NO: 76 is an exemplary Cas13d sequence from Gut_metagenome_contig4781000489.

[0266] SEQ ID NO: 77 is an exemplary Cas13d sequence from Gut_metagenome_contig12144000352.

[0267] SEQ ID NO: 78 is an exemplary Cas13d sequence from Gut_metagenome_contig5590000448.

[0268] SEQ ID NO: 79 is an exemplary Cas13d sequence from Gut_metagenome_contig9269000031.

[0269] SEQ ID NO: 80 is an exemplary Cas13d sequence from Gut_metagenome_contig8537000520.

[0270] SEQ ID NO: 81 is an exemplary Cas13d sequence from Gut_metagenome_contig1845000130.

[0271] SEQ ID NO: 82 is an exemplary Cas13d sequence from gut_metagenome_P13E0k2120140920_c3000072.

[0272] SEQ ID NO: 83 is an exemplary Cas13d sequence from gut_metagenome_P1E0k2120140920_cI000078.

[0273] SEQ ID NO: 84 is an exemplary Cas13d sequence from Gut_metagenome_contig12990000099.

[0274] SEQ ID NO: 85 is an exemplary Cas13d sequence from Gut_metagenome_contig525000349.

[0275] SEQ ID NO: 86 is an exemplary Cas13d sequence from Gut_metagenome_contig7229000302.

[0276] SEQ ID NO: 87 is an exemplary Cas13d sequence from Gut_metagenome_contig3227000343.

[0277] SEQ ID NO: 88 is an exemplary Cas13d sequence from Gut_metagenome_contig7030000469.

[0278] SEQ ID NO: 89 is an exemplary Cas13d sequence from Gut_metagenome_contig5149000068.

[0279] SEQ ID NO: 90 is an exemplary Cas13d sequence from Gut_metagenome_contig400200045.

[0280] SEQ ID NO: 91 is an exemplary Cas13d sequence from Gut_metagenome_contig10420000446.

[0281] SEQ ID NO: 92 is an exemplary Cas13d sequence from new_flavefaciens_strain_XPD3002 (CasRx).

[0282] SEQ ID NO: 93 is an exemplary Cas13d sequence from M26_Gut_metagenome_contig698000307.

[0283] SEQ ID NO: 94 is an exemplary Cas13d sequence from M36_Uncultured_Eubacterium_sp_TS28_c40956.

[0284] SEQ ID NO: 95 is an exemplary Cas13d sequence from M12_gut_metagenome_P25C0k2120140920_c134000066.

[0285] SEQ ID NO: 96 is an exemplary Cas13d sequence from human gut metagenome.

[0286] SEQ ID NO: 97 is an exemplary Cas13d sequence from MlO_gut_metagenome P25C90k2120 1 40920_c2800004 1.

[0287] SEQ ID NO: 98 is an exemplary Cas13d sequence from 30 Ml I_gut_metagenome_P25C7k2120140920_c4078000105.

[0288] SEQ ID NO: 99 is an exemplary Cas13d sequence from gut_metagenome_P25C0k2120140920_c32000045.

[0289] SEQ ID NO: 100 is an exemplary Cas13d sequence from M13_gut_metagenome P23C7k2120140920_c3000067.

[0290] SEQ ID NO: 101 is an exemplary Cas13d sequence from M5_gut_metagenome_Pl8E90k2120140920.

[0291] SEQ ID NO: 102 is an exemplary Cas13d sequence from M21_gut_metagenome_Pl8Ek2120140920.

[0292] SEQ ID NO: 103 is an exemplary Cas13d sequence from M7_gut_metagenome P38C7k2120 1 40920_c484 1 000003.

[0293] SEQ ID NO: 104 is an exemplary Cas13d sequence from Ruminococcus_bicirculans.

[0294] SEQ ID NO: 105 is an exemplary Cas13d sequence.

[0295] SEQ ID NO: 106 is an exemplary Cas13d consensus sequence.

[0296] SEQ ID NO: 107 is an exemplary Cas13d sequence from M18_gut_metagenome P22EOk2120140920_c3395000078.

[0297] SEQ ID NO: 108 is an exemplary Cas13d sequence from M17_gut_metagenome_P22E90k2120140920_c114.

[0298] SEQ ID NO: 109 is an exemplary Cas13d sequence from Ruminococcus_sp_CAG57.

[0299] SEQ ID NO: 110 is an exemplary Cas13d sequence from gut_metagenome_Pl 1E90k2120140920_c43000123.

[0300] SEQ ID NO: 111 is an exemplary Cas13d sequence from M6_gut_metagenome_P13E90k2120 1 40920_c7000009.

[0301] SEQ ID NO: 112 is an exemplary Cas13d sequence from Ml9_gut_metagenome_Pl7E90k2120140920.

[0302] SEQ ID NO: 113 is an exemplary Cas13d sequence from gut_metagenome_P17E0k2120140920,_c87000043.

[0303] SEQ ID NO: 114 is an exemplary human codon optimized Eubacterium siraeum Cas13d nucleic acid sequence.

[0304] SEQ ID NO: 115 is an exemplary human codon optimized Eubacterium siraeum Cas13d nucleic acid sequence with a mutant HEPN domain.

[0305] SEQ ID NO: 116 is an exemplary human codon-optimized Eubacterium siraeum Cas13d nucleic acid sequence with N-terminalNLS.

[0306] SEQ ID NO: 117 is an exemplary human codon-optimized Eubacterium siraeum Cas13d nucleic acid sequence with N- and C-terminal NLS tags.

[0307] SEQ ID NO: 118 is an exemplary human codon-optimized uncultured Ruminococcus sp. Cas13d 30 nucleic acid sequence.

[0308] SEQ ID NO: 119 is an exemplary human codon-optimized uncultured Ruminococcus sp. Cas13d nucleic acid sequence with a mutant HEPN domain.

[0309] SEQ ID NO: 120 is an exemplary human codon-optimized uncultured Ruminococcus sp. Cas13d nucleic acid sequence with N-terminal NLS.

[0310] SEQ ID NO: 121 is an exemplary human codon-optimized uncultured Ruminococcus sp. Cas13d nucleic acid sequence with N- and C-terminal NLS tags.

[0311] SEQ ID NO: 122 is an exemplary human codon-optimized uncultured Ruminococcus flavefaciens FD1 Cas13d nucleic acid sequence.

[0312] SEQ ID NO: 123 is an exemplary human codon-optimized uncultured Ruminococcus flavefaciens FD1 Cas13d nucleic acid sequence with mutated HEPN domain.

[0313] SEQ ID NO: 124 is an exemplary Cas13d nucleic acid sequence from Ruminococcus bicirculans.

[0314] SEQ ID NO: 125 is an exemplary Cas13d nucleic acid sequence from Eubacterium siraeum.

[0315] SEQ ID NO: 126 is an exemplary Cas13d nucleic acid sequence from Ruminococcus flavefaciens FD1.

[0316] SEQ ID NO: 127 is an exemplary Cas13d nucleic acid sequence from Ruminococcus albus.

[0317] SEQ ID NO: 128 is an exemplary Cas13d nucleic acid sequence from Ruminococcus flavefaciens XPD.

[0318] SEQ ID NO: 129 is an exemplary consensus DR nucleic acid sequence for E. siraeum Cas13d.

[0319] SEQ ID NO: 130 is an exemplary consensus DR nucleic acid sequence for Rum. Sp. Cas13d.

[0320] SEQ ID NO: 131 is an exemplary consensus DR nucleic acid sequence for Rum. Flavefaciens strain XPD3002 Cas13d (CasRx).

[0321] SEQ ID NOS: 132-137 are exemplary consensus DR nucleic acid sequences.

[0322] SEQ ID NO: 138 is an exemplary 50% consensus sequence for seven full-length Cas13d orthologues.

[0323] SEQ ID NO: 139 is an exemplary Cas13d nucleic acid sequence from Gut metagenome PlEO.

[0324] SEQ ID NO: 140 is an exemplary Cas13d nucleic acid sequence from Anaerobic digester.

[0325] SEQ ID NO: 141 is an exemplary Cas13d nucleic acid sequence from Ruminococcus sp. CAG:57.

[0326] SEQ ID NO: 142 is an exemplary human codon-optimized uncultured Gut metagenome PlEO Cas13d nucleic acid sequence.

[0327] SEQ ID NO: 143 is an exemplary human codon-optimized Anaerobic Digester Cas13d nucleic acid sequence.

[0328] SEQ ID NO: 144 is an exemplary human codon-optimized Ruminococcus flavefaciens XPD Cas13d nucleic acid sequence.

[0329] SEQ ID NO: 145 is an exemplary human codon-optimized Ruminococcus albus Cas13d nucleic acid sequence.

[0330] SEQ ID NO: 146 is an exemplary processing of the Ruminococcus sp. CAG:57 CRISPR array.

[0331] SEQ ID NO: 147 is an exemplary Cas13d protein sequence from contig emb |OBVH01003037.1, human gut metagenome sequence (also found in WGS contigs emb |OBXZ01000094. 1| and emb |OBJFO1000033.1.

[0332] SEQ ID NO: 148 is an exemplary consensus DR nucleic acid sequence (goes with SEQ ID NO: 147).

[0333] SEQ ID NO: 149 is an exemplary Cas13d protein sequence from contig tpg |DBYI01000091.1| (Uncultivated Ruminococcus flavefaciens UBA1190 assembled from bovine gut metagenome).

[0334] SEQ ID NOS: 150-152 are exemplary consensus DR nucleic acid sequences (goes with SEQ ID NO: 149).

[0335] SEQ ID NO: 153 is an exemplary Cas13d protein sequence from contig tpg |DJXD01000002.1| (uncultivated Ruminococcus assembly, UBA7013, from sheep gutmetagenome).

[0336] SEQ ID NO: 154 is an exemplary consensus DR nucleic acid sequence (goes with SEQ ID NO: 153).

[0337] SEQ ID NO: 155 is an exemplary Cas13d protein sequence from contig OGZC01000639.1 (human gut metagenome assembly).

[0338] SEQ ID NOS: 156-177 are exemplary consensus DR nucleic acid sequences (goes with SEQ ID NO: 155).

[0339] SEQ ID NO: 158 is an exemplary Cas13d protein sequence from contig emb |OHBM01000764.1 (human gut metagenome assembly).

[0340] SEQ ID NO: 159 is an exemplary consensus DR nucleic acid sequence (goes with SEQ ID NO: 158).

[0341] SEQ ID NO: 160 is an exemplary Cas13d protein sequence from contig emb |0HCP01000044.1 (human gut metagenome assembly).

[0342] SEQ ID NO: 161 is an exemplary consensus DR nucleic acid sequence (goes with SEQ ID NO: 160).

[0343] SEQ ID NO: 162 is an exemplary Cas13d protein sequence from contig embl0GDF01008514.1 (human gut metagenome assembly).

[0344] SEQ ID NO: 163 is an exemplary consensus DR nucleic acid sequence (goes with SEQ ID NO: 162).

[0345] SEQ ID NO: 164 is an exemplary Cas13d protein sequence from contig emb |OGPN01002610.1 (human gut metagenome assembly).

[0346] SEQ ID NO: 165 is an exemplary consensus DR nucleic acid sequence (goes with SEQ ID NO: 164).

[0347] SEQ ID NO: 166 is an exemplary Cas13d protein sequence from contig NFIR01000008. 1 (Eubacterium sp. An3, from chicken gut metagenome).

[0348] SEQ ID NO: 167 is an exemplary consensus DR nucleic acid sequence (goes with SEQ ID NO: 166).

[0349] SEQ ID NO: 168 is an exemplary Cas13d protein sequence from contig NFLV01000009.1 (Eubacterium sp. An 11 from chicken gut metagenome).

[0350] SEQ ID NO: 169 is an exemplary consensus DR nucleic acid sequence (goes with SEQ ID NO: 168).

[0351] SEQ ID NOS: 171-174 are an exemplary Cas13d motifsequences.

[0352] SEQ ID NO: 175 is an exemplary Cas13d protein sequence from contig OJMM01002900 human gut metagenome sequence.

[0353] SEQ ID NO: 176 is an exemplary consensus DR nucleic acid sequence (goes with SEQ ID NO: 175).

[0354] SEQ ID NO: 177 is an exemplary Cas13d protein sequence from contig ODAI011611274.1 gut metagenome sequence.

[0355] SEQ ID NO: 178 is an exemplary consensus DR nucleic acid sequence (goes with SEQ ID NO: 177).

[0356] SEQ ID NO: 179 is an exemplary Cas13d protein sequence from contig OIZX01000427.1.

[0357] SEQ ID NO: 180 is an exemplary consensus DR nucleic acid sequence (goes with SEQ ID NO: 179).

[0358] SEQ ID NO: 181 is an exemplary Cas13d protein sequence from contig emb |OCVV012889144.1|.

[0359] SEQ ID NO: 182 is an exemplary consensus DR nucleic acid sequence (goes with SEQ ID NO: 181).

[0360] SEQ ID NO: 183 is an exemplary Cas13d protein sequence from contig OCTW011587266.1

[0361] SEQ ID NO: 184 is an exemplary consensus DR nucleic acid sequence (goes with SEQ ID NO: 183).

[0362] SEQ ID NO: 185 is an exemplary Cas13d protein sequence from contig emb |OGNFO 1009141.1.

[0363] SEQ ID NO: 186 is an exemplary consensus DR nucleic acid sequence (goes with SEQ ID NO: 185).

[0364] SEQ ID NO: 187 is an exemplary Cas13d protein sequence from contig emb |OIEN01002196.1.

[0365] SEQ ID NO: 188 is an exemplary consensus DR nucleic acid sequence (goes with SEQ ID NO: 187).

[0366] SEQ ID NO: 189 is an exemplary Cas13d protein sequence from contig e-k87_11092736.

[0367] SEQ ID NOS: 190-193 are exemplary consensus DR nucleic acid sequences (goes with SEQ ID NO: 189).

[0368] SEQ ID NO: 194 is an exemplary Cas13d sequence from Gut_metagenome_contig6893000291.

[0369] SEQ ID NOS: 195-197 are exemplary Cas13d motif sequences.

[0370] SEQ ID NO: 198 is an exemplary Cas13d protein sequence from Ga0224415_10007274.

[0371] SEQ ID NO: 199 is an exemplary consensus DR nucleic acid sequence (goes with SEQ ID NO: 198).

[0372] SEQ ID NO: 200 is an exemplary Cas13d protein sequence from EMG_10003641.

[0373] SEQ ID NO: 202 is an exemplary Cas13d protein sequence from Ga0129306_1000735.

[0374] SEQ ID NO: 201 is an exemplary consensus DR nucleic acid sequence (goes with SEQ ID NO: 200).

[0375] SEQ ID NO: 202 is an exemplary Cas13d protein sequence from Ga0129306_1000735.

[0376] SEQ ID NO: 203 is an exemplary consensus DR nucleic acid sequence (goes with SEQ ID NO: 203

[0377] SEQ ID NO: 204 is an exemplary Cas13d protein sequence from GaO129317_1 008067.

[0378] SEQ ID NO: 205 is an exemplary consensus DR nucleic acid sequence (goes with SEQ ID NO: 204).

[0379] SEQ ID NO: 206 is an exemplary Cas13d protein sequence from Ga0224415_10048792.

[0380] SEQ ID NO: 207 is an exemplary consensus DR nucleic acid sequence (goes with SEQ ID NO: 206).

[0381] SEQ ID NO: 208 is an exemplary Cas13d protein sequence from 160582958_gene49834.

[0382] SEQ ID NO: 209 is an exemplary consensus DR nucleic acid sequence (goes with SEQ ID NO: 208).

[0383] SEQ ID NO: 210 is an exemplary Cas13d protein sequence from 250twins_35838_GL0110300.

[0384] SEQ ID NO: 211 is an exemplary consensus DR nucleic acid sequence (goes with SEQ ID NO: 210).

[0385] SEQ ID NO: 212 is an exemplary Cas13d protein sequence from 250twins_36050_GLOI58985.

[0386] SEQ ID NO: 213 is an exemplary consensus DR nucleic acid sequence (goes with SEQ ID NO: 212).

[0387] SEQ ID NO: 214 is an exemplary Cas13d protein sequence from 31009_GL0034153.

[0388] SEQ ID NO: 215 is an exemplary consensus DR nucleic acid sequence (goes with SEQ ID NO: 214).

[0389] SEQ ID NO: 216 is an exemplary Cas13d protein sequence from 530373_GL0023589.

[0390] SEQ ID NO: 217 is an exemplary consensus DR nucleic acid sequence (goes with SEQ ID NO: 216).

[0391] SEQ ID NO: 218 is an exemplary Cas13d protein sequence from BMZ-1 1B_GL0037771.

[0392] SEQ ID NO: 219 is an exemplary consensus DR nucleic acid sequence (goes with SEQ ID NO: 218).

[0393] SEQ ID NO: 220 is an exemplary Cas13d protein sequence from BMZ-1 1B_GL0037915.

[0394] SEQ ID NO: 221 is an exemplary consensus DR nucleic acid sequence (goes with SEQ ID NO: 220).

[0395] SEQ ID NO: 222 is an exemplary Cas13d protein sequence from BMZ-1 1B_GL00696 1 7.

[0396] SEQ ID NO: 223 is an exemplary consensus DR nucleic acid sequence (goes with SEQ ID NO: 222).

[0397] SEQ ID NO: 224 is an exemplary Cas13d protein sequence from DLF014_GL0011914.

[0398] SEQ ID NO: 225 is an exemplary consensus DR nucleic acid sequence (goes with SEQ ID NO: 224).

[0399] SEQ ID NO: 226 is an exemplary Cas13d protein sequence from EYZ-362B_GL0088915.

[0400] SEQ ID NO: 227-228 are exemplary consensus DR nucleic acid sequences (goes with SEQ ID NO: 226).

[0401] SEQ ID NO: 229 is an exemplary Cas13d protein sequence from Ga0099364 10024192.

[0402] SEQ ID NO: 230 is an exemplary consensus DR nucleic acid sequence (goes with SEQ ID NO: 229).

[0403] SEQ ID NO: 231 is an exemplary Cas13d protein sequence from Ga0187910_10006931.

[0404] SEQ ID NO: 232 is an exemplary consensus DR nucleic acid sequence (goes with SEQ ID NO: 231).

[0405] SEQ ID NO: 233 is an exemplary Cas13d protein sequence from Ga0187910_10015336.

[0406] SEQ ID NO: 234 is an exemplary consensus DR nucleic acid sequence (goes with SEQ ID NO: 233).

[0407] SEQ ID NO: 235 is an exemplary Cas13d protein sequence from Ga0187910_10040531.

[0408] SEQ ID NO: 236 is an exemplary consensus DR nucleic acid sequence (goes with SEQ ID NO: 23).

[0409] SEQ ID NO: 237 is an exemplary Cas13d protein sequence from Ga0187911_10069260.

[0410] SEQ ID NO: 238 is an exemplary consensus DR nucleic acid sequence (goes with SEQ ID NO: 237).

[0411] SEQ ID NO: 239 is an exemplary Cas13d protein sequence from MH0288_GL0082219.

[0412] SEQ ID NO: 240 is an exemplary consensus DR nucleic acid sequence (goes with SEQ ID NO: 239).

[0413] SEQ ID NO: 241 is an exemplary Cas13d protein sequence from 02.UC29-0_GL0096317.

[0414] SEQ ID NO: 242 is an exemplary consensus DR nucleic acid sequence (goes with SEQ ID NO: 241).

[0415] SEQ ID NO: 243 is an exemplary Cas13d protein sequence from PIG-014_GL0226364.

[0416] SEQ ID NO: 244 is an exemplary consensus DR nucleic acid sequence (goes with SEQ ID NO: 243).

[0417] SEQ ID NO: 245 is an exemplary Cas13d protein sequence from PIG-018_GL0023397.

[0418] SEQ ID NO: 246 is an exemplary consensus DR nucleic acid sequence (goes with SEQ ID NO: 245).

[0419] SEQ ID NO: 247 is an exemplary Cas13d protein sequence from PIG-025_GL0099734.

[0420] SEQ ID NO: 248 is an exemplary consensus DR nucleic acid sequence (goes with SEQ ID NO: 247).

[0421] SEQ ID NO: 249 is an exemplary Cas13d protein sequence from PIG-028_GL0185479.

[0422] SEQ ID NO: 250 is an exemplary consensus DR nucleic acid sequence (goes with SEQ ID NO: 249).

[0423] SEQ ID NO: 251 is an exemplary Cas13d protein sequence from —Ga0224422_10645759.

[0424] SEQ ID NO: 252 is an exemplary consensus DR nucleic acid sequence (goes with SEQ ID NO: 251).

[0425] SEQ ID NO: 253 is an exemplary Cas13d protein sequence from ODAI chimera.

[0426] SEQ ID NO: 254 is an exemplary consensus DR nucleic acid sequence (goes with SEQ ID NO: 253).

[0427] SEQ ID NO: 255 is an HEPN motif.

[0428] SEQ ID NOs: 256 and 257 are exemplary Cas13d nuclear localization signal amino acid and nucleic acid sequences, respectively.

[0429] SEQ ID NOs: 258 and 260 are exemplary SV40 large T antigen nuclear localization signal amino acid and nucleic acid sequences, respectively.

[0430] SEQ ID NO: 259 is a dCas9 target sequence.

[0431] SEQ ID NO: 261 is an artificial Eubacterium siraeum nCasl array targeting ccdB.

[0432] SEQ ID NO: 262 is a full 36 nt direct repeat.

[0433] SEQ ID NOs: 263-266 are spacer sequences.

[0434] SEQ ID NO: 267 is an artificial uncultured Ruminoccus sp. nCasl array targeting ccdB.

[0435] SEQ ID NO: 268 is a full 36 nt direct repeat.

[0436] SEQ ID NOs: 269-272 are spacer sequences.

[0437] SEQ ID NO: 273 is a ccdB target RNA sequence.

[0438] SEQ ID NOs: 274-277 are spacer sequences.

[0439] SEQ ID NO: 278 is a mutated Cas13d sequence, NLS-Ga_0531(trunc)-NLS-HA. This mutant has a deletion of the non-conserved N-terminus.

[0440] SEQ ID NO: 279 is a mutated Cas13d sequence, NES-Ga_0531(trunc)-NES-HA. This mutant has a deletion of the non-conserved N-terminus.

[0441] SEQ ID NO: 280 is a full-length Cas13d sequence, NLS-RfxCas13d-NLS-HA.

[0442] SEQ ID NO: 281 is a mutated Cas13d sequence, NLS-RfxCas13d(del5)-NLS-HA. This mutant has a deletion of amino acids 558-587.

[0443] SEQ ID NO: 282 is a mutated Cas13d sequence, NLS-RfxCas13d(del5.12)-NLS-HA. This mutant has a deletion of amino acids 558-587 and 953-966.

[0444] SEQ ID NO: 283 is a mutated Cas13d sequence, NLS-RfxCas13d(del5.13)-NLS-HA. This mutant has a deletion of amino acids 376-392 and 558-587.

[0445] SEQ ID NO: 284 is a mutated Cas13d sequence, NLS-RfxCas13d(del5.12+5. 13)-NLS-HA. This mutant has a deletion of amino acids 376-392, 558-587, and 953-966.

[0446] SEQ ID NO: 285 is a mutated Cas13d sequence, NLS-RfxCas13d(dell3)-NLS-HA. This mutant has a deletion of amino acids 376-392.

[0447] SEQ ID NO: 286 is an effector sequence used to edit expression of ADAR2. Amino acids 1 to 969 are dRfxCas13, aa 970 to 991 are an NLS sequence, and amino acids 992 to 1378 are ADAR2DD.

[0448] SEQ ID NO: 287 is an exemplary HIV NES protein sequence.

[0449] SEQ ID NOS: 288-291 are exemplary Cas13d motif sequences.

[0450] SEQ ID NO: 292 is Cas13d ortholog sequence MH_4866.

[0451] SEQ ID NO: 293 is an exemplary Cas13d protein sequence from 037_-_emblOIZA01000315.11

[0452] SEQ ID NO: 294 is an exemplary Cas13d protein sequence from PIG-022 GL002635 1.

[0453] SEQ ID NO: 295 is an exemplary Cas13d protein sequence from PIG-046_GL0077813.

[0454] SEQ ID NO: 296 is an exemplary Cas13d protein sequence from pig chimera.

[0455] SEQ ID NO: 297 is an exemplary nuclease-inactive or dead Cas13d (dCas13d) protein sequence from Ruminococcus flavefaciens XPD3002 (CasRx)

[0456] SEQ ID NO: 298 is an exemplary Cas13d protein sequence.

[0457] SEQ ID NO: 299 is an exemplary Cas13d protein sequence from (contig tpg|DJXD01000002.1|; uncultivated Ruminococcus assembly, UBA7013, from sheep gut metagenome).

[0458] SEQ ID NO: 300 is an exemplary Cas13d direct repeat nucleotide sequence from Cas13d (contig tpg|DJXD01000002.1|; uncultivated Ruminococcus assembly, UBA7013, from sheep gut metagenome (goes with SEQ ID NO: 299).

[0459] SEQ ID NO: 301 is an exemplary Cas13d protein contig emb|OBLI01020244.

[0460] Yan et al. (2018) Mol Cell. 70(2):327-339 (doi: 10.1016/j.molcel.2018.02.2018) and Konermann et al. (2018) Cell 173(3):665-676 (doi: 10.1016/j.cell/2018.02.033) have described Cas13d proteins and both of which are incorporated by reference herein in their entireties. Also see WO Publication Nos. WO2018/183403 (CasM, which is Cas13d) and WO2019/006471 (Cas13d), which are incorporated herein by reference in their entirety.

[0461] SEQ ID NO: 586 is an exemplary cas13d with no catalytic activity, referred to as deactivatedCas13d or dCas13d.

[0462] SEQ ID NO: 587 is an exemplary cas13d with no catalytic activity, referred to as deactivatedCas13d or dCas13d.

[0463] SEQ ID NO: 588 is an exemplary cas13d with no catalytic activity, referred to as deactivatedCas13d or dCas13d.

[0464] SEQ ID NO: 589 is an exemplary cas13d with no catalytic activity, referred to as deactivatedCas13d or dCas13d.

[0465] SEQ ID NO: 303 is an exemplary CasM protein from Eubacterium siraeum.

[0466] SEQ ID NO: 304 is an exemplary CasM protein from Ruminococcus sp., isolate 2789STDY5834971.

[0467] SEQ ID NO: 305 is an exemplary CasM protein from Ruminococcus bicirculans.

[0468] SEQ ID NO: 306 is an exemplary CasM protein from Ruminococcus sp., isolate 2789STDY5608892.

[0469] SEQ ID NO: 307 is an exemplary CasM protein from Ruminococcus sp. CAG:57.

[0470] SEQ ID NO: 308 is an exemplary CasM protein from Ruminococcus flavefaciens FD-1.

[0471] SEQ ID NO: 309 is an exemplary CasM protein from Ruminococcus albus strain KH2T6.

[0472] SEQ ID NO: 310 is an exemplary CasM protein from Ruminococcus flavefaciens strain XPD3002.

[0473] SEQ ID NO: 311 is an exemplary CasM protein from Ruminococcus sp., isolate 2789STDY5834894.

[0474] SEQ ID NO: 312 is an exemplary RtcB homolog.

[0475] SEQ ID NO: 313 is an exemplary WYL from Eubacterium siraeum+C-terminal NLS.

[0476] SEQ ID NO: 314 is an exemplary WYL from Ruminococcus sp. isolate 2789STDY5834971+C-term NLS.

[0477] SEQ ID NO: 315 is an exemplary WYL from Ruminococcus bicirculans+C-term NLS.

[0478] SEQ ID NO: 316 is an exemplary WYL from Ruminococcus sp. isolate 2789STDY5608892+C-term NLS.

[0479] SEQ ID NO: 317 is an exemplary WYL from Ruminococcus sp. CAG:57+C-term NLS.

[0480] SEQ ID NO: 318 is an exemplary WYL from Ruminococcus flavefaciens FD-1+C-term NLS.

[0481] SEQ ID NO: 319 is an exemplary WYL from Ruminococcus albus strain KH2T6+C-term NLS.

[0482] SEQ ID NO: 320 is an exemplary WYL from Ruminococcus flavefaciens strain XPD3002+C-term NLS.

[0483] SEQ ID NO: 321 is an exemplary RtcB from Eubacterium siraeum+C-term NLS.

[0484] SEQ ID NO: 322 is an exemplary direct repeat sequence of Ruminococcus flavefaciens XPD3002 Cas13d (CasRx).

[0485] SEQ ID NO: 530 is an exemplary Cas13d nucleic acid sequence, seq198.

[0486] SEQ ID NO: 535 is an exemplary Cas13d nucleic acid sequence, seq179.

[0487] SEQ ID NO: 538 is an exemplary Cas13d nucleic acid sequence, seq42.

[0488] SEQ ID NO: 540 is an exemplary Cas13d nucleic acid sequence, seq212.

[0489] SEQ ID NO: 537 is an exemplary nucleic acid sequence encoding an exemplary DR nucleic acid sequence corresponding to SEQ ID NO: 538.

[0490] Exemplary wild type Cas13d proteins of the disclosure may comprise or consist of the amino acid sequence SEQ ID NO: 92 or SEQ ID NO: 298 (Cas13d protein also known as CasRx).

[0491] An exemplary direct repeat sequence of Ruminococcus flavefaciens XPD3002 Cas13d (CasRx) comprises the nucleic acid sequence:

(SEQ ID NO: 302)
AACCCCTACCAACTGGTCGGGGTTTGAAAC.

gRNA Target Sequences

[0492] The compositions of the disclosure bind and destroy a target sequence of an RNA molecule comprising a pathogenic repeat sequence. In one embodiment, the target RNA comprises a sequence motif corresponding to a spacer sequence of the guide RNA corresponding to the RNA-guided RNA-binding protein. In some embodiments, one or more spacer sequences are used to target one or more target sequences. In some embodiments, multiple spacers are used to target multiple target RNAs. Such target RNAs can be different target sites within the same RNA molecule or can be different target sites within different RNA molecules. Spacer sequences can also target non-coding RNA. In some embodiments, multiple promoters, e.g., Pol III promoters) can be used to drive multiple spacers in a gRNA for targeting multiple target RNAs. In one embodiment, the destruction of the target RNA(s) or target sequence motif(s) reduces expression of pathogenic CUG repeat RNA thereby treating DM1 and/or ameliorating one or more symptoms associated with DM1.

[0493] In some embodiments of the compositions and methods of the disclosure, the sequence motif of the target RNA is a signature of a disease or disorder.

[0494] A sequence motif of the disclosure may be isolated or derived from a sequence of foreign or exogenous sequence found in a genomic sequence, and therefore translated into an mRNA molecule of the disclosure or a sequence of foreign or exogenous sequence found in an RNA sequence of the disclosure.

[0495] A target sequence motif of the disclosure may comprise, consist of, be situated by, or be associated with a mutation in an endogenous sequence that causes a disease or disorder. The mutation may comprise or consist of a sequence substitution, inversion, deletion, insertion, transposition, or any combination thereof.

[0496] A target sequence motif of the disclosure may comprise or consist of a repeated sequence. In some embodiments, the repeated sequence may be associated with a microsatellite instability (MSI). MSI at one or more loci results from impaired DNA mismatch repair mechanisms of a cell of the disclosure. A hypervariable sequence of DNA may be transcribed into an mRNA of the disclosure comprising a target sequence comprising or consisting of the hypervariable sequence.

[0497] A target sequence motif of the disclosure may comprise or consist of a biomarker. The biomarker may indicate a risk of developing a disease or disorder. The biomarker may indicate a healthy gene (low or no determinable risk of developing a disease or disorder. The biomarker may indicate an edited gene. Exemplary biomarkers include, but are not limited to, single nucleotide polymorphisms (SNPs), sequence variations or mutations, epigenetic marks, splice acceptor sites, exogenous sequences, heterologous sequences, and any combination thereof.

[0498] A target sequence motif of the disclosure may comprise or consist of a secondary, tertiary or quaternary structure. The secondary, tertiary or quaternary structure may be endogenous or naturally occurring. The secondary, tertiary or quaternary structure may be induced or non-naturally occurring. The secondary, tertiary or quaternary structure may be encoded by an endogenous, exogenous, or heterologous sequence.

[0499] In some embodiments of the compositions and methods of the disclosure, a target sequence of an RNA molecule comprises or consists of between 2 and 100 nucleotides or nucleic acid bases, inclusive of the endpoints. In some embodiments, the target sequence of an RNA molecule comprises or consists of between 2 and 50 nucleotides or nucleic acid bases, inclusive of the endpoints. In some embodiments, the target sequence of an RNA molecule comprises or consists of between 2 and 20 nucleotides or nucleic acid bases, inclusive of the endpoints. In some embodiments, the target sequence of an RNA molecule comprises or consists of between 20-30 nucleotides or nucleic acid bases, inclusive of the endpoints. In some embodiments, the target sequence of an RNA molecule comprises or consists of about 26 nucleotides or nucleic acid bases, inclusive of the endpoints.

[0500] In some embodiments of the compositions and methods of the disclosure, a target sequence of an RNA molecule is continuous. In some embodiments, the target sequence of an RNA molecule is discontinuous. For example, the target sequence of an RNA molecule may comprise or consist of one or more nucleotides or nucleic acid bases that are not contiguous because one or more intermittent nucleotides are positioned in between the nucleotides of the target sequence.

[0501] In some embodiments of the compositions and methods of the disclosure, a target sequence of an RNA molecule is naturally occurring. In some embodiments, the target sequence of an RNA molecule is non-naturally occurring. Exemplary non-naturally occurring target sequences may comprise or consist of sequence variations or mutations, chimeric sequences, exogenous sequences, heterologous sequences, chimeric sequences, recombinant sequences, sequences comprising a modified or synthetic nucleotide or any combination thereof.

[0502] In some embodiments of the compositions and methods of the disclosure, a target sequence of an RNA molecule binds to a guide RNA of the disclosure. In some embodiments of the compositions and methods of the disclosure, one or more target sequences of an RNA molecule binds to one or more guide RNA spacer sequences of the disclosure.

[0503] In some embodiments of the compositions and methods of the disclosure, a target sequence of an RNA molecule binds to a first RNA binding protein of the disclosure.

[0504] In some embodiments of the compositions and methods of the disclosure, a target sequence of an RNA molecule binds to a second RNA binding protein of the disclosure.

[0505] Compositions of the disclosure comprise a gRNA comprising a spacer sequence that specifically binds to a target toxic CUG RNA repeat sequence. In some embodiments, the spacer which binds the target CUG RNA repeat sequence comprises or consists of about 20-30 nucleotides. In some embodiments, a gRNA comprises one or more spacer sequences.

[0506] Exemplary gRNA spacer sequences of the disclosure that specifically bind to a target CUG sequence of an RNA molecule are set forth in SEQ ID NOs 457-459.

### Endonucleases

[0507] In some embodiments, the compositions of the disclosure comprise a second RNA binding protein which comprises or consists of a nuclease or endonuclease domain. In some embodiments, the second RNA-binding protein is an effector protein. In some embodiments, the second RNA binding protein binds RNA in a manner in which it associates with RNA. In some embodiments, the second RNA binding protein associates with RNA in a manner in which it cleaves RNA. In some embodiments, the second RNA-binding protein is fused to a first RNA-binding protein which is a PUF, PUMBY, or PPR-based protein. In one embodiment, the second RNA-binding protein is fused to a first RNA-binding protein which is a deactivated Cas-based (dCas-based) protein.

[0508] In some embodiments of the compositions of the disclosure, the second RNA binding protein comprises or consists of an RNase.

[0509] In some embodiments, the second RNA binding protein comprises or consists of an RNase1. In some embodiments, the RNase1 protein comprises or consists of SEQ ID NO: 325.

[0510] In some embodiments, the second RNA binding protein comprises or consists of an RNase4. In some embodiments, the RNase4 protein comprises or consists of SEQ ID NO: 326.

[0511] In some embodiments, the second RNA binding protein comprises or consists of an RNase6. In some embodiments, the RNase6 protein comprises or consists of SEQ ID NO: 327.

[0512] In some embodiments, the second RNA binding protein comprises or consists of an RNase7. In some embodiments, the RNase7 protein comprises or consists of SEQ ID NO: 328.

[0513] In some embodiments, the second RNA binding protein comprises or consists of an RNase8. In some embodiments, the RNase8 protein comprises or consists of SEQ ID NO: 329.

[0514] In some embodiments, the second RNA binding protein comprises or consists of an RNase2. In some embodiments, the RNase2 protein comprises or consists of SEQ ID NO: 330.

[0515] In some embodiments, the second RNA binding protein comprises or consists of an RNase6PL. In some embodiments, the RNase6PL protein comprises or consists of SEQ ID NO: 331.

[0516] In some embodiments, the second RNA binding protein comprises or consists of an RNaseL. In some embodiments, the RNaseL protein comprises or consists of SEQ ID NO: 332.

[0517] In some embodiments, the second RNA binding protein comprises or consists of an RNaseT2. In some embodiments, the RNaseT2 protein comprises or consists of SEQ ID NO: 333.

[0518] In some embodiments, the second RNA binding protein comprises or consists of an RNase1 1. In some embodiments, the RNase1 1 protein comprises or consists of SEQ ID NO: 334.

[0519] In some embodiments, the second RNA binding protein comprises or consists of an RNaseT2-like. In some embodiments, the RNaseT2-like protein comprises or consists of SEQ ID NO: 335.

[0520] In some embodiments of the compositions of the disclosure, the second RNA binding protein comprises or consists of a mutated RNase.

[0521] In some embodiments, the second RNA binding protein comprises or consists of a mutated RNase1 (RNase1(K41R)) polypeptide. In some embodiments, the RNase1(K41R) polypeptide comprises or consists of SEQ ID NO: 336.

[0522] In some embodiments, the second RNA binding protein comprises or consists of a mutated RNase1 (RNase1(K41R, D121E)) polypeptide. In some embodiments, the RNase1 (RNase1(K41R, D121E)) polypeptide comprises or consists of SEQ ID NO: 337.

[0523] In some embodiments, the second RNA binding protein comprises or consists of a mutated RNase1 (RNase1(K41R, D121E, H119N)) polypeptide. In some embodiments, the RNase1 (RNase1(K41R, D121E, H119N)) polypeptide comprises or consists of SEQ ID NO: 338.

[0524] In some embodiments, the second RNA binding protein comprises or consists of a mutated RNase1. In some embodiments, the second RNA binding protein comprises or consists of a mutated RNase1 (RNase1(H119N)) polypeptide. In some embodiments, the RNase1 (RNase1(H119N)) polypeptide comprises or consists of SEQ ID NO: 339.

[0525] In some embodiments, the second RNA binding protein comprises or consists of a mutated RNase1 (RNase1(R39D, N67D, N88A, G89D, R91D, H119N)) polypeptide.

[0526] In some embodiments, the RNase1 (RNase1(R39D, N67D, N88A, G89D, R91D, H119N)) polypeptide comprises or consists of SEQ ID NO: 340.

[0527] In some embodiments, the second RNA binding protein comprises or consists of a mutated RNase1 (RNase1(R39D, N67D, N88A, G89D, R91D, H119N)) polypeptide. In some embodiments, the RNase1 (RNase1(R39D, N67D, N88A, G89D, R91D, Hi19N, K41R, D121E)) polypeptide comprises or consists of SEQ ID NO: 341. In some embodiments, the second RNA binding protein comprises or consists of a mutated RNase1 (RNase1(R39D, N67D, N88A, G89D, R91D, HI19N)) polypeptide. In some embodiments, the RNase1 (RNase1(R39D, N67D, N88A, G89D, R91D)) polypeptide comprises or consists of SEQ ID NO: 342.

[0528] In some embodiments, the second RNA binding protein comprises or consists of a mutated RNase1 (RNase1 (R39D, N67D, N88A, G89D, R91D, H119N, K41R, D121E)) polypeptide that comprises or consists of SEQ ID NO: 343.

[0529] In some embodiments of the compositions of the disclosure, the second RNA binding protein comprises or consists of a NOB1 polypeptide. In some embodiments, the NOB1 polypeptide comprises or consists of SEQ ID NO: 344.

[0530] In some embodiments of the compositions of the disclosure, the second RNA binding protein comprises or consists of an endonuclease. In some embodiments, the second RNA binding protein comprises or consists of an endonuclease V (ENDOV). In some embodiments, the ENDOV protein comprises or consists of SEQ ID NO: 345.

[0531] In some embodiments, the second RNA binding protein comprises or consists of an endonuclease G (ENDOG). In some embodiments, the ENDOG protein comprises or consists of SEQ ID NO: 346.

[0532] In some embodiments, the second RNA binding protein comprises or consists of an endonuclease D1 (ENDOD1). In some embodiments, the ENDOD1 protein comprises or consists of SEQ ID NO: 347.

[0533] In some embodiments, the second RNA binding protein comprises or consists of a Human flap endonuclease-1 (hFEN1). In some embodiments, the hFEN1 polypeptide comprises or consists of SEQ ID NO: 348.

[0534] In some embodiments, the second RNA binding protein comprises or consists of a DNA repair endonuclease XPF (ERCC4) polypeptide. In some embodiments, the ERCC4 polypeptide comprises or consists of SEQ ID NO: 349.

[0535] In some embodiments of the compositions of the disclosure, the second RNA binding protein comprises or consists of an Endonuclease III-like protein 1 (NTHL) polypeptide. In some embodiments, the NTHL polypeptide comprises or consists of SEQ ID NO: 340.

[0536] In some embodiments of the compositions of the disclosure, the second RNA binding protein comprises or consists of a human Schlafen 14 (hSLFN14) polypeptide. In some embodiments, the hSLFN14 polypeptide comprises or consists of SEQ ID NO: 351.

[0537] In some embodiments of the compositions of the disclosure, the second RNA binding protein comprises or consists of a human beta-lactamase-like protein 2 (hLACTB2) polypeptide. In some embodiments, the hLACTB2 polypeptide comprises or consists of SEQ ID NO: 352.

[0538] In some embodiments of the compositions of the disclosure, the second RNA binding protein comprises or consists of an apurinic/apyrimidinic (AP) endodeoxyribonuclease (APEX) polypeptide. In some embodiments, the second RNA binding protein comprises or consists of an apurinic/apyrimidinic (AP) endodeoxyribonuclease (APEX2) polypeptide. In some embodiments, the APEX2 polypeptide comprises or consists of SEQ ID NO: 353.

[0539] In some embodiments, the APEX2 polypeptide comprises or consists of SEQ ID NO: 354.

[0540] In some embodiments, the second RNA binding protein comprises or consists of an apurinic or apyrimidinic site lyase (APEX1) polypeptide. In some embodiments, the APEX1 polypeptide comprises or consists of SEQ ID NO: 355.

[0541] In some embodiments of the compositions of the disclosure, the second RNA binding protein comprises or consists of an angiogenin (ANG) polypeptide. In some embodiments, the ANG polypeptide comprises or consists of SEQ ID NO: 356.

[0542] In some embodiments of the compositions of the disclosure, the second RNA binding protein comprises or consists of a heat responsive protein 12 (HRSP12) polypeptide. In some embodiments, the HRSP12 polypeptide comprises or consists of SEQ ID NO: 357.

[0543] In some embodiments of the compositions of the disclosure, the second RNA binding protein comprises or consists of a Zinc Finger CCCH-Type Containing 12A (ZC3H12A) polypeptide. In some embodiments, the ZC3H12A polypeptide is an endonuclease domain of the Z3H12A polypeptide which comprises or consists of SEQ ID NO: 358, also referred to as E17 herein. In some embodiments, the ZC3H12A polypeptide comprises or consists of SEQ ID NO: 359.

[0544] In some embodiments of the compositions of the disclosure, the second RNA binding protein comprises or consists of a Reactive Intermediate Imine Deaminase A (RIDA) polypeptide. In some embodiments, the RIDA polypeptide comprises or consists of SEQ ID NO: 360.

[0545] In some embodiments of the compositions of the disclosure, the second RNA binding protein comprises or consists of a Phospholipase D Family Member 6 (PDL6) polypeptide. In some embodiments, the PDL6 polypeptide comprises or consists of SEQ ID NO: 361.

[0546] In some embodiments of the compositions of the disclosure, the second RNA binding protein comprises or consists of a mitochondrial ribonuclease P catalytic subunit (KIAA0391) polypeptide. In some embodiments, the KIAA0391 polypeptide comprises or consists of SEQ ID NO: 362.

[0547] In some embodiments of the compositions of the disclosure, the second RNA binding protein comprises or consists of an argonaute 2 (AGO2) polypeptide. In some embodiments of the compositions of the disclosure, the AGO2 polypeptide comprises or consists of SEQ ID NO: 363.

[0548] In some embodiments of the compositions of the disclosure, the second RNA binding protein comprises or consists of a mitochondrial nuclease EXOG (EXOG) polypeptide. In some embodiments, the EXOG polypeptide comprises or consists of SEQ ID NO: 364.

[0549] In some embodiments of the compositions of the disclosure, the second RNA binding protein comprises or consists of a Zinc Finger CCCH-Type Containing 12D (ZC3H12D) polypeptide. In some embodiments, the ZC3H12D polypeptide comprises or consists of SEQ ID NO: 365.

[0550] In some embodiments of the compositions of the disclosure, the second RNA binding protein comprises or consists of an endoplasmic reticulum to nucleus signaling 2 (ERN2) polypeptide. In some embodiments, the ERN2 polypeptide comprises or consists of SEQ ID NO: 366.

[0551] In some embodiments of the compositions of the disclosure, the second RNA binding protein comprises or consists of a pelota mRNA surveillance and ribosome rescue factor (PELO) polypeptide. In some embodiments, the PELO polypeptide comprises or consists of SEQ ID NO: 367.

[0552] In some embodiments of the compositions of the disclosure, the second RNA binding protein comprises or consists of a YBEY metallopeptidase (YBEY) polypeptide. In some embodiments, the YBEY polypeptide comprises or consists of SEQ ID NO: 368.

[0553] In some embodiments of the compositions of the disclosure, the second RNA binding protein comprises or consists of a cleavage and polyadenylation specific factor 4 like (CPSF4L) polypeptide. In some embodiments, the CPSF4L polypeptide comprises or consists of SEQ ID NO: 369.

[0554] In some embodiments of the compositions of the disclosure, the second RNA binding protein comprises or consists of an hCG_2002731 polypeptide. In some embodiments, the hCG_2002731 polypeptide comprises or consists of SEQ ID NO: 370.

[0555] In some embodiments, the hCG_2002731 polypeptide comprises or consists of SEQ ID NO: 371.

[0556] In some embodiments of the compositions of the disclosure, the second RNA binding protein comprises or consists of an Excision Repair Cross-Complementation Group 1 (ERCC1) polypeptide. In some embodiments, the ERCC1 polypeptide comprises or consists of SEQ ID NO: 372.

[0557] In some embodiments of the compositions of the disclosure, the second RNA binding protein comprises or consists of a ras-related C3 botulinum toxin substrate 1 isoform (RAC1) polypeptide. In some embodiments, the RAC1 polypeptide comprises or consists of SEQ ID NO: 373.

[0558] In some embodiments of the compositions of the disclosure, the second RNA binding protein comprises or consists of a Ribonuclease A A1 (RAA1) polypeptide. In some embodiments, the RAA1 polypeptide comprises or consists of SEQ ID NO: 374.

[0559] In some embodiments of the compositions of the disclosure, the second RNA binding protein comprises or consists of a Ras Related Protein (RAB1) polypeptide. In some embodiments, the RAB1 polypeptide comprises or consists of SEQ ID NO: 375.

[0560] In some embodiments of the compositions of the disclosure, the second RNA binding protein comprises or consists of a DNA Replication Helicase/Nuclease 2 (DNA2) polypeptide. In some embodiments, the DNA2 polypeptide comprises or consists of SEQ ID NO: 376.

[0561] In some embodiments of the compositions of the disclosure, the second RNA binding protein comprises or consists of a FLJ35220 polypeptide. In some embodiments, the FLJ35220 polypeptide comprises or consists of SEQ ID NO: 377.

[0562] In some embodiments of the compositions of the disclosure, the second RNA binding protein comprises or consists of a FLJ13173 polypeptide. In some embodiments, the FLJ13173 polypeptide comprises or consists of SEQ ID NO: 378.

[0563] In some embodiments of the compositions of the disclosure, the second RNA binding protein comprises or consists of Teneurin Transmembrane Protein (TENM) polypeptide. In some embodiments, the second RNA binding protein comprises or consists of Teneurin Transmembrane Protein 1 (TENM1) polypeptide. In some embodiments, the TENM1 polypeptide comprises or consists of SEQ ID NO: 379.

[0564] In some embodiments, the second RNA binding protein comprises or consists of Teneurin Transmembrane Protein 2 (TENM2) polypeptide. In some embodiments, the TENM2 polypeptide comprises or consists of SEQ ID NO: 380.

[0565] In some embodiments of the compositions of the disclosure, the second RNA binding protein comprises or consists of a Ribonuclease Kappa (RNaseK) polypeptide. In some embodiments, the RNaseK polypeptide comprises or consists of SEQ ID NO: 381.

[0566] In some embodiments of the compositions of the disclosure, the second RNA binding protein comprises or consists of a transcription activator-like effector nuclease (TALEN) polypeptide or a nuclease domain thereof In some embodiments, the TALEN polypeptide comprises or consists of SEQ ID NO: 382. In some embodiments, the TALEN polypeptide comprises or consists of SEQ ID NO: 383.

[0567] In some embodiments of the compositions of the disclosure, the second RNA binding protein comprises or consists a zinc finger nuclease polypeptide or a nuclease domain thereof In some embodiments, the second RNA binding protein comprises or consists of a ZNF638 polypeptide or a nuclease domain thereof In some embodiments, the ZNF638 polypeptide comprises or consists of SEQ ID NO: 384.

[0568] In some embodiments of the compositions of the disclosure, the second RNA binding protein comprises or consists of a PIN domain derived from the human SMG6 protein, also commonly known as telomerase-binding protein EST1A isoform 3, NCBI Reference Sequence: NP_001243756.1. In some embodiments, the PIN from hSMG6 is used herein in the form of a Cas fusion protein and as an internal control, for example, and without limitation. In some embodiments, the PIN polypeptide comprises or consists of SEQ ID NO: 598.

[0569] In some embodiments of the compositions of the disclosure, the composition further comprises (a) a sequence comprising a gRNA that specifically binds within an RNA molecule and (b) a sequence encoding a nuclease. In some embodiments, a nuclease comprises a sequence isolated or derived from a CRISPR/Cas protein. In some embodiments, a nuclease comprises a sequence isolated or derived from a TALEN or a nuclease domain thereof In some embodiments, a nuclease comprises a sequence isolated or derived from a zinc finger nuclease or a nuclease domain thereof.

### AAV Vectors

[0570] An “AAV vector” as used herein refers to a vector comprising, consisting essentially of, or consisting of one or more nucleic acid molecules and one or more AAV inverted terminal repeat sequences (ITRs). In some aspects, the nucleic acid molecule encodes for a CAG-repeat targeting protein and/or composition of the disclosure. Such AAV vectors can be replicated and packaged into infectious viral particles when present in a host cell that provides the functionality of rep and cap gene products; for example, by transfection of the host cell. In some aspects, AAV vectors contain a promoter, at least one nucleic acid that may encode at least one protein or RNA, and/or an enhancer and/or a terminator within the flanking ITRs that is packaged into the infectious AAV particle. The encapsidated nucleic acid portion may be referred to as the AAV vector genome. Plasmids containing AAV vectors may also contain elements for manufacturing purposes, e.g., antibiotic resistance genes, origin of replication sequences etc., but these are not encapsidated and thus do not form part of the AAV particle.

[0571] In some aspects, an AAV vector can comprise at least one nucleic acid molecule encoding a CUG-repeat targeting composition of the disclosure. In some aspects, an AAV vector can comprise at least one regulatory sequence. In some aspects, an AAV vector can comprise at least one AAV inverted terminal (ITR) sequence. In some aspects, an AAV vector can comprise a first ITR sequence and a second ITR sequence. In some aspects, an AAV vector can comprise at least one promoter sequence. In some aspects, an AAV vector can comprise at least one enhancer sequence. In some aspects, an AAV vector can comprise at least one polyA sequence. In some aspects, an AAV vector can comprise at least one linker sequence. In some aspects, an AAV vector of the disclosure can comprise at least on nuclear localization signals. In some aspects, an AAV vector of the disclosure can comprise a CUG-repeat targeting PUF or PUMBY protein, peptide, or fragment thereof In some aspects, an AAV vector of the disclosure can comprise a Cas protein, peptide, or fragment thereof. In some aspects, an AAV vector of the disclosure can comprise an endonuclease protein, peptide, or fragment thereof In some aspects, an AAV vector of the disclosure can comprise a guide RNA, in some cases a CUG-repeat targeting guide RNA. In some aspects, AAV vectors of the disclosure can comprise a fusion protein comprising one or more elements of the disclosure, including, but not limited to, a CUG-repeat targeting protein (such as a Cas, PUF, or PUMBY) and an endonuclease. Optionally, fusion proteins of the AAV vector can further comprise a linker amino acid sequence between the one or more elements of the disclosure.

[0572] In some aspects, a AAV vector can comprise a first AAV ITR sequence, a promoter sequence, a CUG-repeat targeting composition nucleic acid molecule, a regulatory sequence and a second AAV ITR sequence. In some aspects, an AAV vector can comprise, in the 5′ to 3′ direction, a first AAV ITR sequence, a promoter sequence, a transgene nucleic acid molecule, and a second AAV ITR sequence.

### CUG-Targeting Cas13d Vectors

[0573] In some embodiments of the compositions of the disclosure, CUG-targeting Cas13d compositions are packaged as AAV unitary vectors. In some embodiments, CUG-targeting Cas13d compositions packaged as AAV unitary vectors are set forth in SEQ ID NOs 518, 528, 534, 536, and 539.

[0574] In some embodiments, a CUG-targeting Cas13d composition comprises from 5′ to 3′: a human U6 promoter, a cas13d gRNA, wherein the gRNA comprises a direct repeat sequence and a CUG targeting spacer sequence, an EFS promoter, a kozak sequence, a SV-40 NLS sequence, a linker sequences, a sequence encoding Cas13d, a linker sequence, a SV40 NLS sequence, a linker sequence, an HA tag sequence, and a BGH poly a sequence. In some embodiments, a nucleic acid encoding a CUG-targeting Cas13d composition is set forth in SEQ ID NO: 518. In some embodiments, the CUG-targeting Cas13d composition is arranged as depicted in Table 3.

TABLE 3
CUG-targeting Cas13d composition for packaging in AAV unitary
vectors

| Plasmid Element | Amino Acid Sequences |
|---|---|
| Human U6 promoter | gagggcctatttcccatgattccttcatatttgcatatacgatacaaggctgttagagagataattggaatta |
| | atttgactgtaaacacaaagatattagtacaaaatacgtgacgtagaaagtaataatttcttgggtagtttgc |
| | agttttaaaattatgttttaaaatggactatcatatgcttaccgtaacttgaaagtatttcgatttcttggct |
| | ttatatatcttGTGGAAAGGACGAAACACC (SEQ ID NO: 519) |
| CasRx direct repeat | AACCCCTACCAACTGGTCGGGGTTTGAAAC (SEQ ID NO: 302) |
| (DR) | |
| Spacer (CTG guide 3) | CAGCAGCAGCAGCAGCAGCAGCAGCA (SEQ ID NO: 459) |
| EFS promoter | TAGGTCTTGAAAGGAGTGGGAATTGGCTCCGGTGCCCGTCAGTGGGCAGAGCGCA |
| | CATCGCCCACAGTCCCCGAGAAGTTGGGGGGAGGGGTCGGCAATTGATCCGGTGC |
| | CTAGAGAAGGTGGCGCGGGGTAAACTGGGAAAGTGATGTCGTGTACTGGCTCCGC |
| | CTTTTTCCCGAGGGTGGGGGAGAACCGTATATAAGTGCAGTAGTCGCCGTGAACGT |
| | TCTTTTTCGCAACGGGTTTGCCGCCAGAACACAGG (SEQ ID NO: 520) |
| Kozak Sequence | AGAACCATG (SEQ ID NO: 546) |
| SV-40 NLS | CCCAAGAAgAAGAGAAAGGTG (SEQ ID NO: 524) |
| Linker | GAGGCCAGC (SEQ ID NO: 521) |
| CasRx | ATCGAAAAAAAAAAGTCCTTCGCCAAGGGCATGGGCGTGAAGTCCACACTCGTGT |
| | CCGGCTCCAAAGTGTACATGACAACCTTCGCCGAAGGCAGCGACGCCAGGCTGGA |
| | AAAGATCGTGGAGGGCGACAGCATCAGGAGCGTGAATGAGGGCGAGGCCTTCAG |
| | CGCTGAAATGGCCGATAAAAACGCCGGCTATAAGATCGGCAACGCCAAATTCAGC |
| | CATCCTAAGGGCTACGCCGTGGTGGCTAACAACCCTCTGTATACAGGACCCGTCCA |
| | GCAGGATATGCTCGGCCTGAAGGAAACTCTGGAAAAGAGGTACTTCGGCGAGAGC |
| | GCTGATGGCAATGACAATATTTGTATCCAGGTGATCCATAACATCCTGGACATTGA |
| | AAAAATCCTCGCCGAATACATTACCAACGCCGCCTACGCCGTCAACAATATCTCCG |
| | GCCTGGATAAGGACATTATTGGATTCGGCAAGTTCTCCACAGTGTATACCTACGAC |
| | GAATTCAAAGACCCCGAGCACCATAGGGCCGCTTTCAACAATAACGATAAGCTCA |
| | TCAACGCCATCAAGGCCCAGTATGACGAGTTCGACAACTTCCTCGATAACCCCAGA |
| | CTCGGCTATTTCGGCCAGGCCTTTTTCAGCAAGGAGGGCAGAAATTACATCATCAA |
| | TTACGGCAACGAATGCTATGACATTCTGGCCCTCCTGAGCGGACTGAGGCACTGGG |
| | TGGTCCATAACAACGAAGAAGAGTCCAGGATCTCCAGGACCTGGCTCTACAACCT |
| | CGATAAGAACCTCGACAACGAATACATCTCCACCCTCAACTACCTCTACGACAGG |
| | ATCACCAATGAGCTGACCAACTCCTTCTCCAAGAACTCCGCCGCCAACGTGAACTA |
| | TATTGCCGAAACTCTGGGAATCAACCCTGCCGAATTCGCCGAACAATATTTCAGAT |
| | TCAGCATTATGAAAGAGCAGAAAAACCTCGGATTCAATATCACCAAGCTCAGGGA |
| | AGTGATGCTGGACAGGAAGGATATGTCCGAGATCAGGAAAAATCATAAGGTGTTC |
| | GACTCCATCAGGACCAAGGTCTACACCATGATGGACTTTGTGATTTATAGGTATTA |
| | CATCGAAGAGGATGCCAAGGTGGCTGCCGCCAATAAGTCCCTCCCCGATAATGAG |
| | AAGTCCCTGAGCGAGAAGGATATCTTTGTGATTAACCTGAGGGGCTCCTTCAACGA |
| | CGACCAGAAGGATGCCCTCTACTACGATGAAGCTAATAGAATTTGGAGAAAGCTC |
| | GAAAATATCATGCACAACATCAAGGAATTTAGGGGAAACAAGACAAGAGAGTAT |
| | AAGAAGAAGGACGCCCCTAGACTGCCCAGAATCCTGCCCGCTGGCCGTGATGTTT |
| | CCGCCTTCAGCAAACTCATGTATGCCCTGACCATGTTCCTGGATGGCAAGGAGATC |
| | AACGACCTCCTGACCACCCTGATTAATAAATTCGATAACATCCAGAGCTTCCTGAA |
| | GGTGATGCCTCTCATCGGAGTCAACGCTAAGTTCGTGGAGGAATACGCCTTTTTCA |
| | AAGACTCCGCCAAGATCGCCGATGAGCTGAGGCTGATCAAGTCCTTCGCTAGAAT |
| | GGGAGAACCTATTGCCGATGCCAGGAGGGCCATGTATATCGACGCCATCCGTATTT |
| | TAGGAACCAACCTGTCCTATGATGAGCTCAAGGCCCTCGCCGACACCTTTTCCCTG |
| | GACGAGAACGGAAACAAGCTCAAGAAAGGCAAGCACGGCATGAGAAATTTCATT |
| | ATTAATAACGTGATCAGCAATAAAAGGTTCCACTACCTGATCAGATACGGTGATCC |
| | TGCCCACCTCCATGAGATCGCCAAAAACGAGGCCGTGGTGAAGTTCGTGCTCGGC |
| | AGGATCGCTGACATCCAGAAAAAACAGGGCCAGAACGGCAAGAACCAGATCGAC |
| | AGGTACTACGAAACTTGTATCGGAAAGGATAAGGGCAAGAGCGTGAGCGAAAAG |
| | GTGGACGCTCTCACAAAGATCATCACCGGAATGAACTACGACCAATTCGACAAGA |
| | AAAGGAGCGTCATTGAGGACACCGGCAGGGAAAACGCCGAGAGGGAGAAGTTTA |
| | AAAAGATCATCAGCCTGTACCTCACCGTGATCTACCACATCCTCAAGAATATTGTC |
| | AATATCAACGCCAGGTACGTCATCGGATTCCATTGCGTCGAGCGTGATGCTCAACT |
| | GTACAAGGAGAAAGGCTACGACATCAATCTCAAGAAACTGGAAGAGAAGGGATT |
| | CAGCTCCGTCACCAAGCTCTGCGCTGGCATTGATGAAACTGCCCCCGATAAGAGA |
| | AAGGACGTGGAAAAGGAGATGGCTGAAAGAGCCAAGGAGAGCATTGACAGCCTC |
| | GAGAGCGCCAACCCCAAGCTGTATGCCAATTACATCAAATACAGCGACGAGAAGA |
| | AAGCCGAGGAGTTCACCAGGCAGATTAACAGGGAGAAGGCCAAAACCGCCCTGA |
| | ACGCCTACCTGAGGAACACCAAGTGGAATGTGATCATCAGGGAGGACCTCCTGAG |
| | AATTGACAACAAGACATGTACCCTGTTCAGAAACAAGGCCGTCCACCTGGAAGTG |
| | GCCAGGTATGTCCACGCCTATATCAACGACATTGCCGAGGTCAATTCCTACTTCCA |
| | ACTGTACCATTACATCATGCAGAGAATTATCATGAATGAGAGGTACGAGAAAAGC |
| | AGCGGAAAGGTGTCCGAGTACTTCGACGCTGTGAATGACGAGAAGAAGTACAACG |
| | ATAGGCTCCTGAAACTGCTGTGTGTGCCTTTCGGCTACTGTATCCCCAGGTTTAAG |
| | AACCTGAGCATCGAGGCCCTGTTCGATAGGAACGAGGCCGCCAAGTTCGACAAGG |
| | AGAAAAAGAAGGTGTCCGGCAATTCC (SEQ ID NO: 144) |
| Linker | GGATCCgga (SEQ ID NO: 523) |
| SV40 NLS | Cctaagaaaaagaggaaggtg (SEQ ID NO: 532) |
| Linker | Gcggccgct (SEQ ID NO: 525) |
| HA tag | TACCCATACGATGTTCCAGATTACGCT (SEQ ID NO: 526) |
| BGH polyA | TGTGCCTTCTAGTTGCCAGCCATCTGTTGTTTGCCCCTCCCCCGTGCCTTCCTTGAC |
| | CCTGGAAGGTGCCACTCCCACTGTCCTTTCCTAATAAAATGAGGAAATTGCATCGC |
| | ATTGTCTGAGTAGGTGTCATTCTATTCTGGGGGGTGGGGGGGGCAGGACAGCAA |
| | GGGGGAGGATTGGGAAGACAATAGCAGGCATGCTGGGGATGCGGTGGGCTCTATG |
| | GC (SEQ ID NO: 527) |

[0575] In some embodiments, an AAV vector comprising a CUG-targeting Cas13d composition comprises from 5′ to 3′: a human U6 promoter, a cas13d gRNA, wherein the gRNA comprises a direct repeat sequence and a CUG targeting spacer sequence, an EFS promoter, a kozak sequence, a sequence encoding Cas13d, a linker sequence, a SV40 NLS sequence, and a SV40 poly a sequence. In some embodiments, a nucleic acid encoding a CUG-targeting Cas13d composition is set forth in SEQ ID NO: 528. In some embodiments, the CUG-targeting Cas13d composition is arranged as depicted in Table 4.

TABLE 4
CUG-targeting Cas13d composition for packaging in AAV unitary
vectors

| Plasmid Element | Amino Acid Sequences |
|---|---|
| Human U6 promoter | GAGGGCCTATTTCCCATGATTCCTTCATATTTGCATATACGATACAAGGCTGTTAG |
| | AGAGATAATTAGAATTAATTTGACTGTAAACACAAAGATATTAGTACAAAATACG |
| | TGACGTAGAAAGTAATAATTTCTTGGGTAGTTTGCAGTTTTAAAATTATGTTTTAA |
| | AATGGACTATCATATGCTTACCGTAACTTGAAAGTATTTCGATTTCTTGGCTTTATA |
| | TATCTTGTGGAAAGGACGAAACACC (SEQ ID NO: 519) |
| Seq198 direct repeat | Caagtaaacccctaccaagtggtcggggtttgaaac (SEQ ID NO: 199) |
| (DR) | |
| Spacer (CTG guide 3) | CAGCAGCAGCAGCAGCAGCAGCAGCA (SEQ ID NO: 459) |
| EFS promoter | TAGGTCTTGAAAGGAGTGGGAATTGGCTCCGGTGCCCGTCAGTGGGCAGAGCGCA |
| | CATCGCCCACAGTCCCCGAGAAGTTGGGGGGAGGGGTCGGCAATTGATCCGGTGC |
| | CTAGAGAAGGTGGCGCGGGGTAAACTGGGAAAGTGATGTCGTGTACTGGCTCCGC |
| | CTTTTTCCCGAGGGTGGGGGAGAACCGTATATAAGTGCAGTAGTCGCCGTGAACGT |
| | TCTTTTTCGCAACGGGTTTGCCGCCAGAACACAGG (SEQ ID NO: 520) |
| Kozak Sequence | gccgccaccATG (SEQ ID NO: 529) |
| Cas13d Seq198 | ATCGAAAAGAAGAAGAGCTACGCTAAAGGAATGGGCCTGAAAAGCACCATCGTGT |
| | CCGGCTCTAAAGTGTACATGACAACCTTCGGCGATGGCAGCGAGGCCAGACTGGA |
| | GAAGGTGGTTGAGAACGATAGCATCAAGACCCTGCACGAGGGCGAGGCCTTCAGC |
| | GCTGAGATGACCGACAACAACGCCGGCTATAAGATCGGAAACGTGAAGTTCTCCC |
| | ACCCTAACGGCTACGACGTGGTCGCCAACAACCCTTTCTACACCGGCCCTGTGCAG |
| | CAGGACATGCTGGGCCTGAAAGAAATCCTGGAAAGACGGTACTTTGGATCTAGCA |
| | CAGACGGTAACAATACCATCTGCATCCAAATCATCCACAATATCCTGGATATCGAA |
| | AAAATTCTGGCAGAGTACATCACAAACGCAGTGTACGCCACCAACAACATCATCG |
| | ATCCTGATAACGACGTGATCGGCGGCAAGAAGTTCACCAGCATTAAAACCTTCGC |
| | CCAGTTCTCCGCCAGCGACAGCAGCAACGATTTCGAGCAGTTCCTGAAAAATCCCA |
| | GACTCGGCTACCTGGGCAAAGCCTTTTTCTACAAGGACGGCAAGCGGAACAACAG |
| | ACAGAAGGATCCTATCGAGTGTTACCACCTGCTGGCCCTGCTGTGCGGCCTGCGTA |
| | ATTGGGTTGTGCACAACAACGAGGAAAAGGACCTGATCAAGTACACCTGGTTGTA |
| | TAACCTGGACAAGTACCTGGATGCCGAGTACATCACCACCCTGAACTACATGTACA |
| | ACGACATCGGCGACGAGTTGACGGACTCTTTCTCCAAGAACAGCGCCGCCAATAT |
| | CAACTACATCGCCGAGACCCTGGGAATCGACCCCAAGACCTTCGCCGAGCAATAC |
| | TTCCGGTTCTCTATCATGAAGGAACAGAAAAACCTGGGATTCAACCTGACCAAGCT |
| | GAGAGAGGTGATGCTGGACCGGAAGGACATGAGCGAGATCAGAGAGAACCACAA |
| | CGACTTCGATTCTATCAGAGCCAAGGTGTACACAATGATGGACTTCGTGATCTATC |
| | GGTACTACATCGAAGAGGCCGCTAAGGTGAACGCCGCCAACAAGAGCCTGCCCGA |
| | CAACGAGAAGAGCCTGAGCGAGAAAGACATCTTCGTGATTTCACTCAGAGGCAGC |
| | TTCAACGAAGATCAGAAGGATCGGCTGTACTACGACGAGGCGCAAAGACTGTGGT |
| | CCAAGGTGGGCAAACTGATGCTGAAAATCAAGAAGTTCCGGGGCAAGGACACCAG |
| | AAAGTACAAGAATATGGGCACACCTAGAATCCGGAGGCTGATCCCTGAGGGCAGA |
| | GATATCAGCACCTTCTCCAAGCTGATGTACGCTCTGACTATGTTCCTGGACGGCAA |
| | GGAGATCAATGACCTGCTGACCACACTGATCAACAAATTCGACAACATCCAGAGC |
| | TTCTTAAAGGTGATGCCTCTGATCGGCGTGAACGCCAAATTTGCCGAAGAATATAG |
| | TTTCTTCAACAACTCTGAAAAAATCGCCGACGAACTGCGGCTGATCAAGAGCTTTG |
| | CTAGAATGGGAGAACCCGTGGCTGACGCCAGAAGAGCCATGTATATCGACGCAAT |
| | TCGCATCCTGGGCACCGATCTCTCCGACGACGAGCTGAAGGCCCTGGCTGATTCTT |
| | TTAGCCTGGACGAGAACGGCAATAAGCTGGGGAAGGGCAAGCACGGCATGAGAA |
| | ACTTCATCATTAACAACGTGATAACAAATAAGAGATTCCACTACCTGATCCGGTAC |
| | GGCAACCCAGTCCACCTGCATGAGATCGCCAAGAATGAAGCCGTGGTCAAGTTTG |
| | TGCTGGGAAGAATCGCCGATATCCAGAAGAAACAGGGCCAGAACGGCAAGAACC |
| | AGATCGATAGATACTACGAGACATGCATCGGCAAGGACTCTTCTAAAAGCGTGGC |
| | CGAGAAGGTGAACGCCCTGACCAAGATCATCACAGGCATGAACTACGACCAGTTC |
| | GACAGCAGACGGAACGTGATCGAAAACACCGGCGCCGGCAACGCCGAGAGAGAA |
| | AAGTACAAGAAGATCATCAGCCTGTACCTGACAGTGATCTACCACATCCTGAAGA |
| | ACATTGTTAATATCAACTCAAGATACGTGATCGGATTTCACTGCGTGGAGAGAGAT |
| | GCCCAGCTGTATAAGGAAAAGGGCTACGACATTAATCTGAAAAAGCTGAAAGACA |
| | AGGGATTCACAAGCGTGACCAAGCTGTGCGCCGGAATCGACGAGGAATGCAAGGA |
| | CGTCGAAAAGGAAATGACCGAGCGGGCCAAGGCCTCTTTCGCTGCCCTGGAAACC |
| | GCCAACCCCAAGCTGTACGCCACATACATCAACTACTCTGATGAAGAGAAGAATG |
| | CCGAACTGAGAAAGCAGATCAATAGAGAGAAGGCCAAAACCGCCCTGAACGCTC |
| | ATCTGCGCAACACCAAGTGGAACGTGATCATCCGGGAAGATCTTCTGAGAAGAGA |
| | TAACAAGGCTTGTAAAATCTTCAGAAATAAGGTCGCCCACCTGGAGGCCATCCGA |
| | TACGCTCACCTGTACATCAACGACATCGCTGAGGTGAATAGCTATTTTCAGTTTTA |
| | CCACTACATCATGCAGCGGAGGATCATGGCCGAACGGTACGACAAGAGCAGCGGC |
| | AAGGTTAGAGAATACTTCGACGCCGTGAACAATGAGAAAAAATACAACGATAGAC |
| | TGCTGAAGCTCCTCTGTGTGCCATTCGGCTACTGCATCCCTAGATTCAAGAATCTG |
| | AGCATCGAGGCCCTGTTCGACATGAACGAGGCCGTGAAGTTTGATAAGGAAAAGA |
| | AG (SEQ ID NO: 530) |
| Linker | GGATCC (SEQ ID NO: 531) |
| SV40 NLS | CCCAAAAAAAAAAGGAAGGTG (SEQ ID NO: 532) |
| SV-40 poly A | AACTTGTTTATTGCAGCTTATAATGGTTACAAATAAAGCAATAGCATCACAAATTT |
| | CACAAATAAAGCATTTTTTTCACTGCATTCTAGTTGTGGTTTGTCCAAACTCATCAA |
| | TGTATCTTA (SEQ ID NO: 533) |

[0576] In some embodiments, an AAV vector comprising a CUG-targeting Cas13d composition comprises from 5′ to 3′: a human U6 promoter, a cas13d gRNA, wherein the gRNA comprises a direct repeat sequence and a CUG targeting spacer sequence, an EFS promoter, a kozak sequence, a sequence encoding Cas13d, a linker sequence, a SV40 NLS sequence, and anSV40 poly a sequence. In some embodiments, a nucleic acid encoding a CUG-targeting Cas13d composition is set forth in SEQ ID NO: 534. In some embodiments, the CUG-targeting Cas13d composition is arranged as depicted in Table 5.

TABLE 5
CUG-targeting Cas13d composition for packaging in AAV unitary
vectors

| Plasmid Element | Amino Acid Sequences |
|---|---|
| Human U6 promoter | GAGGGCCTATTTCCCATGATTCCTTCATATTTGCATATACGATACAAGGCTGTTAG |
| | AGAGATAATTAGAATTAATTTGACTGTAAACACAAAGATATTAGTACAAAATACG |
| | TGACGTAGAAAGTAATAATTTCTTGGGTAGTTTGCAGTTTTAAAATTATGTTTTAA |
| | AATGGACTATCATATGCTTACCGTAACTTGAAAGTATTTCGATTTCTTGGCTTTATA |
| | TATCTTGTGGAAAGGACGAAACACC (SEQ ID NO: 519) |
| Seq179 direct repeat | Actatagccctgccggaaatgacagggttctacaac (SEQ ID NO: 180) |
| (DR) | |
| Spacer (CTG guide 3) | CAGCAGCAGCAGCAGCAGCAGCAGCA (SEQ ID NO: 459) |
| EFS promoter | TAGGTCTTGAAAGGAGTGGGAATTGGCTCCGGTGCCCGTCAGTGGGCAGAGCGCA |
| | CATCGCCCACAGTCCCCGAGAAGTTGGGGGGAGGGGTCGGCAATTGATCCGGTGC |
| | CTAGAGAAGGTGGCGCGGGGTAAACTGGGAAAGTGATGTCGTGTACTGGCTCCGC |
| | CTTTTTCCCGAGGGTGGGGGAGAACCGTATATAAGTGCAGTAGTCGCCGTGAACGT |
| | TCTTTTTCGCAACGGGTTTGCCGCCAGAACACAGG (SEQ ID NO: 520) |
| Kozak Sequence | gccgccaccATG (SEQ ID NO: 529) |
| Cas 13d Seq179 | GCCAAAAAGAAGAAAACCGCTCGCCAACTGAGAGAAGAAATGCAACAACAGCGG |
| | AAACAGGCCATTCAGAAGCAACAAGAACAGAGACAAGAGAAAGCCGCCGCCGCT |
| | CGCGAGACAGCCGCCCCCGAACAGCCTGCTGCCGCTCCTGTGCCAAAGCGGCAAA |
| | GAAAATCTCTGGCCAAAGCCGCCGGACTGAAGTCCAACTTCATCTTGGACCCACA |
| | GAGAAGAACAACAGTGATGACAGCTTTTGGCCAGGGCAGCACCGCCATCCTGGAG |
| | AAGCAGATCGTGGACAGAGCCATCAGCGACCTGCAGCCGGTTCAGCAGTTCCAAG |
| | TGGAACCTGCCAGTGCCGCCAAGTACAGGCTGAAGAATAGCCGGGTGAGATTCCC |
| | CAACGTGACAGCTGACGATCCTCTGTATAGACGGAAGGATGGCGGCTTCGTGCCT |
| | GGCATGGACGCCCTCAGAAGAAAGAACGTACTGGAACAGAGATTCTTCGGCAAGT |
| | CTTTCGCCGATAACATCCACATCCAGATGATCTACAGCATCCTGGACATCCACAAG |
| | ATCCTCGCTGCCGCGAGCGGCCACATCGTGCACCTGCTCAATATCGTGAATGGCTC |
| | AAAAGATAGAGACTTCATCGGCATGCTGGCCGCCCACGTGCTGTACAATGAGCTG |
| | AACGAGGAGGCCAAGCGGAGCATCGCCGACTTTTGCAAGAGTCCCAGACTGATCT |
| | ACTACTCTGCTGCTTTCTACGAGACATTGGACAACGGCAAGAGCGAGCGACGGTCT |
| | AACGAGGACATCTTCAACATCCTGGCCCTGATGACCTGTCTGAGAAATTTCAGCAG |
| | CCACCACAGCATCGCCATCAAGGTGAAGGACTACAGCGCCGCTGGCCTGTACAAC |
| | CTGCGGAGACTGGGACCTGACATGAAGAAAATGCTGGACACCTTCTACACCGAGG |
| | CCTTCATCCAGCTTAACCAGAGCTTCCAGGACCACAACACCACAAACCTGACATGT |
| | CTGTTCGATATCCTGAACATCTCTGATAGCGCCAGACAGAAGCAGCTGGCTGAGG |
| | AATTTTATAGATACGTGGTGTTCAAGGAACAAAAGAACTTGGGATTCTCCGTGCGG |
| | AAGCTGAGAGAGGAAATGCTGCTGCTGCCAGACGCTGCCGTGATCGCCGATAAGC |
| | GGTACGACACCTGCAGATCCAAGCTGTACAACCTGATGGACTTCCTGATCCTGAGA |
| | GTGTACAGAACCGGCAGAGCCGACAGATGCGACAAGCTGCCTGAGGCCCTGCGGG |
| | CCGCCCTGACCGACGAGGAAAAGGCCGTGGTGTACCACAAAGAAGCCCTGAGCCT |
| | GTGGAACGAGATGAGAACCCTGATCCTCGACGGCCTGCTGCCTCAGATGACACCT |
| | GAGAACCTGAGCAGACTGTCCGGTCAGAAAAGAAAGGGCGAACTGTCTCTGGATG |
| | ACGCCATGCTGAAAGAGTGCCTGTACGAGCCCGGACCTGTGCCCGAGGATGCTGC |
| | CCCTGAGGAAGCCAACGCCGAGTACTTCTGCCGGATGATCTACCTGGCCACCCTGT |
| | TTATGGATGGCAAGGAGATCAACACCCTGCTGACCACCCTGATTAGCAAATTCGA |
| | GAACATCGCCGCCTTCCTGCAGACCATGGAACAGCTGAACATCGAGGCCGAGCTG |
| | GGCCCTGAATACGCCATGTTTACCAGAAGCAGAGCCGTAGCCGAGCAGCTGAGAG |
| | TGATCAACAGCTTCGCCCTGATGAAGAAGCCTCAGGTGAATGCCAAGCAGCAGCT |
| | GTACAGAGCCGCTGTCACCCTGCTGGGAACAGAGGACCCTGACGGCGTGACCGAT |
| | GAGATGCTGTGCATCGACCCCGTGACCGGCAAGATGCTGCCTCCTAACCAGAGGC |
| | ATCATGGCGACACCGGCTTACGGAACTTCATCGCAAACAACGTGGTGGAAAGCCG |
| | GAGATTCCAGTACTTAATCCGGTACAGCGATCCTGCTCAGCTGCACCAGCTCGCCA |
| | GCAACAAGAAGCTGGTCAGATTCGTGCTGAGCAGCATCCCCGACACACAGATCAA |
| | CAGATACTATGAAACCTGTGGCCAGACCAGACTGGCCGGCAGAGCCGCCAAGGTG |
| | GAATTCCTGACAGACATGATTGCCGCCATCAGATTCGACCAGTTTCGGGATGTCAA |
| | TCAGAAAGAGCGCGGCGCCAATACTCAGAAAGAAAGATATAAGGCCATGCTTGGC |
| | CTGTACCAGACCGTGCTGTACCTGGCTGTTAAAAATCTGGTGAACATTAACGCCAG |
| | ATACGTGATGGCCTTCCACTGCGTGGAGCGGGATATGTTTCTGTATGACGGCGAGC |
| | TGACAGATCCCAAGGGCGAGAGCGTGTCTGCTTTCCTGGCTGTGAATGGAAAGAA |
| | GGGCGTGCAGCCTCAGTACCTGCTGCTGACCCAGCTGTTTATCCGGCGGGATTACC |
| | TTAAGCGGAGTGCATGCGAGCAGATCCAGCACAACATGGAAAACATCTCCGACCG |
| | GCTGCTGCGGGAATACCGGAACGCCGTCGCCCACCTGAATGTGATAGCCCATCTG |
| | GCTGACTACTCTGCCGACATGAGAGAAATCACCAGCTACTACGGCTTGTATCACTA |
| | CCTGATGCAGAGACACCTCTTCAAAAGACACGCCTGGCAGATCAGACAGCCTGAA |
| | AGGCCAACTGAGGAGGAACAGAAGCTCATCGAGCAGGAGCAGAAGCAGCTGGCC |
| | TGGGAGAAGGCCCTGTTTGACAAGACCCTGCAGTACCACAGCTACAACAAGGACC |
| | TGGTGAAGGCTCTTAACGCCCCCTTCGGATACAACCTGGCAAGATACAAGAACCT |
| | GTCTATCGAGCCTCTGTTCAGCAAAGAAGCCGCTCCTGCCGCCGAGATCAAGGCCA |
| | CACACGCC (SEQ ID NO: 535) |
| Linker | GGATCC (SEQ ID NO: 531) |
| SV40 NLS | CCCAAAAAAAAAAGGAAGGTG (SEQ ID NO: 532) |
| SV-40 poly A | AACTTGTTTATTGCAGCTTATAATGGTTACAAATAAAGCAATAGCATCACAAATTT |
| | CACAAATAAAGCATTTTTTTCACTGCATTCTAGTTGTGGTTTGTCCAAACTCATCAA |
| | TGTATCTTA (SEQ ID NO: 533) |

[0577] In some embodiments, an AAV vector comprising a CUG-targeting Cas13d composition comprises from 5′ to 3′: a human U6 promoter, a cas13d gRNA, wherein the gRNA comprises a direct repeat sequence and a CUG targeting spacer sequence, an EFS promoter, a kozak sequence, a sequence encoding Cas13d, a linker sequence, a SV40 NLS sequence, and anSV40 poly a sequence. In some embodiments, a nucleic acid encoding a CUG-targeting Cas13d composition is set forth in SEQ ID NO: 536. In some embodiments, the CUG-targeting Cas13d composition is arranged as depicted in Table 6.

TABLE 6
CUG-targeting Cas13d composition for packaging in AAV unitary
vectors

| Plasmid Element | Amino Acid Sequences |
|---|---|
| Human U6 promoter | GAGGGCCTATTTCCCATGATTCCTTCATATTTGCATATACGATACAAGGCTGTTAG |
| | AGAGATAATTAGAATTAATTTGACTGTAAACACAAAGATATTAGTACAAAATACG |
| | TGACGTAGAAAGTAATAATTTCTTGGGTAGTTTGCAGTTTTAAAATTATGTTTTAA |
| | AATGGACTATCATATGCTTACCGTAACTTGAAAGTATTTCGATTTCTTGGCTTTATA |
| | TATCTTGTGGAAAGGACGAAACACC (SEQ ID NO: 519) |
| Seq42 direct repeat | GACCAACACCTCTGCAAAACTGCAGGGGTCTAAAAC (SEQ ID NO: 537) |
| (DR) | |
| Spacer (CTG guide 3) | CAGCAGCAGCAGCAGCAGCAGCAGCA (SEQ ID NO: 459) |
| EFS promoter | TAGGTCTTGAAAGGAGTGGGAATTGGCTCCGGTGCCCGTCAGTGGGCAGAGCGCA |
| | CATCGCCCACAGTCCCCGAGAAGTTGGGGGGAGGGGTCGGCAATTGATCCGGTGC |
| | CTAGAGAAGGTGGCGCGGGGTAAACTGGGAAAGTGATGTCGTGTACTGGCTCCGC |
| | CTTTTTCCCGAGGGTGGGGGAGAACCGTATATAAGTGCAGTAGTCGCCGTGAACGT |
| | TCTTTTTCGCAACGGGTTTGCCGCCAGAACACAGG (SEQ ID NO: 520) |
| Kozak Sequence | gccgccaccATG (SEQ ID NO: 529) |
| Cas13d Seq42 | AACAATAAGAGAAAGACAAAGGCCAAGGCCGCTGGACTGAAGAGCGTCTTTTTTG |
| | ATCAGAAGCAAGCCGTGCTGACCACATTCGCCAAGGGCAACAACTCCCAGATCGA |
| | GAAGAAAGTGGTCAACAGCGAGGTCAAAGATCTGAGACAGCCTCCCGCCTTTGAT |
| | CTGGAACTGAAGGAGAAGACCTTCTATATCTCCGGCAAGAACAACATTAACACAT |
| | CTAGGGAGAACCCTCTGGCTAGCGCTTCTCTGCCTCTCTCCAAGAGGCAAAGGATT |
| | AGAGCCGAGAGGATCAAGAGAGCTAGAGAAGAAAATAGACCCTACCATAATGTC |
| | AAGAGGGTGGGAGAGGACGATCTGAGAGCCAAGGCTGACCTCGAGAAACACTAC |
| | TTCGGCAAGGAGTACAGCGATAATCTGAAAATTCAGATTATTTATAATATCCTCGA |
| | CATCAACAAAATCATCAGCCCCTATATCAATGACATCGTCTACTCCATGAACAATC |
| | TGGCTAGAAACGACGAGTATATCGATGGAAAAATCGACGTGATCGGCTCCCTCTC |
| | CTCCACCACAGACTACTCCTCCTTCATGAGCCCCAACAAGGATCTGGAAAAGGAA |
| | AAAAAGTTTTCCTTCCATAGAGAAAACTACAAAAAATTCGTCGAGGCCAGCAAGC |
| | CCTACATGAGGTACTATGGAAAGGTGTTTATTAGAGACGTGAAGAAAAGCAAGCT |
| | CTCCACCGGAAAGGGCGAGAAGATTGAGGTGATGTATAGATCCGACGAGGAAATT |
| | TTCACCATTTTTCAAATTCTGAGCTATGTGAGACAATCCATCATGCACAACGACAT |
| | CGGAAACAAGAGCAGCATTCTGGCCATCGAAAAGTACCCCGCCAGATTCGTCGGC |
| | TTTCTGAGCGACCTCCTCAAAACCAAGACAAACGATGTCAATAGAATGTTCATTGA |
| | CAATAACAGCCAAACAAACTTCTGGGTGCTCTTCAGCATCTTCGGACTGCAAGATC |
| | ACACCAGCGGAGCCGACAAGATCTGTAGAAATTTCTACGACTTCGTGATCAAGGC |
| | CGACAGCAAAAACCTCGGATTCTCCCTCAAGAAGATCAGAGAGCTGATGCTCGAT |
| | CTGCCTAACGCCAACATGCTGAGAGATCACCAATTCGATACCGTGAGGAGCAAGT |
| | TTTATACCCTCCTCGACTTCATTATCTATCAACACTATCTCGAGGAGAAGTCCAGA |
| | ATCGACAACATGGTGGAGAAGCTGAGGATGACCCTCAAGGAAGAGGAAAAGGAA |
| | GTGCTCTACGCTGCCGAGGCCAAGATTGTGTGGAATGCCATCGGAGCCAAGGTCA |
| | TCAACAAGCTCGTGCCCATGATGAATGGCGATGCTCTGAAGGAGATCAAGAGAAA |
| | AAATAGAGATAGAAAGCTCCCTCAGAGCGTGATCGCCACAGTGCAAGTGAATTCC |
| | GACGCCAATGTGTTCTCCGGACTGATCTACTTTCTGACACTGTTTCTCGACGGCAA |
| | GGAGATCAACGAGATGGTGAGCAACCTCATCACCAAGTTCGAGAACATTGACTCT |
| | CTGCTGCATGTCGATAGAGAAATCTACAAGTCCGACGAGAAGGATCTGGATCTCG |
| | AGATCGAGAAGCTGGCCCTCTTTTTCAAGGGCGTGGTGAGGCCTAATGCCAAGAC |
| | AGATACCGGCGCCGGAGAGATCTCCAAGAGCTTCTCCATCTTCCAGAGCGCCGAA |
| | AGGATTATCGAGGAACTGAAGTTCATTAAGAACGTCACAAGAATGGATAACGAGA |
| | TCTTCCCTAGCGAGGGCGTGTTCCTCGATGCCGCTAACGTGCTCGGCGTCAGAGGC |
| | GATGACTTTGACTTTAGCAATGAGTTTGTCGGAGACGATCTGCACAGCGACGCTAA |
| | TAAGAAGATTATTAACAAGATCAATGGCACCAAGGAGGACAGAAATCTGAGGAAC |
| | TTTATTATTAATAACGTCGTGAAGAGCAGAAGGTTTCAGTATATCGCTAGACACAT |
| | GAATACACACTACGTCAAGCAGCTCGCCAATAACGAGACACTGAATAGATTCGTG |
| | CTGAACAAGATGGGAGACGCCAAGATCATCAATAGGTACTACGAGTCCATCTCCG |
| | GCAATACCCCCAATATTGAGGTCAGAAGCCAAATCGACTACCTCGTCAAGAGACT |
| | GAGGAGCTTCAGCTTCGAAGACCTCAACGACGTCAAGCAAAAGGTGAGACCCGGC |
| | ACCAATGAGAGCATCGAGAAGGAGAAGAAAAAGGCCCTCGTCGGACTGTGCCTCA |
| | CAATTCAGTACCTCGTGTATAAAAATCTGGTGAATATCAACGCTAGGTACACCACC |
| | GCTTTCTACTGTCTGGAGAGGGACTCCAAACTGAAAGGCTTTGGCGTGGACGTGTG |
| | GAGAGATTTCGAATCCTACACCGCTCTGACCAATCACTTTATCAAAGAAGGCTATC |
| | TGCCCGTGAGAAAGGCTGAAATTCTGAGGGCCAATCTGAAGCATCTGGACTGTGA |
| | AGACGGCTTCAAATATTACAGAAACCAAGTGACCCACCTCAACGCCATTAGAGTC |
| | GCCTATAAATATATCAACGAGATTAAATCCGTGCACAGCTACTTCGCCCTCTACCA |
| | CTACATCATGCAGAGACATCTGTACGACAGCCTCCAAGCCAAAGCTAAGGACTCC |
| | TCCGGCTTCGTGATCGACGCTCTGAAGAAATCCTTCGAGCACAAGATCTACAGCAA |
| | AGATCTGCTCCACGTGCTGCACTCCCCCTTCGGCTATAATACCGCTAGATATAAAA |
| | ATCTGAGCATCGAGGCCCTCTTCGACAAGAACGAATCCAGACCCGAGGTGAATCC |
| | CCTCTCCACCAATGAT (SEQ ID NO: 538) |
| Linker | GGATCC (SEQ ID NO: 531) |
| SV40 NLS | CCCAAAAAAAAAAGGAAGGTG (SEQ ID NO: 532) |
| SV-40 poly A | AACTTGTTTATTGCAGCTTATAATGGTTACAAATAAAGCAATAGCATCACAAATTT |
| | CACAAATAAAGCATTTTTTTCACTGCATTCTAGTTGTGGTTTGTCCAAACTCATCAA |
| | TGTATCTTA (SEQ ID NO: 533) |

[0578] In some embodiments, an AAV vector comprising a CUG-targeting Cas13d composition comprises from 5′ to 3′: a human U6 promoter, a cas13d gRNA, wherein the gRNA comprises a direct repeat sequence and a CUG targeting spacer sequence, an EFS promoter, a kozak sequence, a sequence encoding Cas13d, a linker sequence, a SV40 NLS sequence, and anSV40 poly a sequence. In some embodiments, a nucleic acid encoding a CUG-targeting Cas13d composition is set forth in SEQ ID NO: 539. In some embodiments, the CUG-targeting Cas13d composition is arranged as depicted in Table 7.

TABLE 7
CUG-targeting Cas13d compositions for packaging in AAV unitary
vectors

| Plasmid Element | Amino Acid Sequences |
|---|---|
| Human U6 promoter | GAGGGCCTATTTCCCATGATTCCTTCATATTTGCATATACGATACAAGGCTGTTAG |
| | AGAGATAATTAGAATTAATTTGACTGTAAACACAAAGATATTAGTACAAAATACG |
| | TGACGTAGAAAGTAATAATTTCTTGGGTAGTTTGCAGTTTTAAAATTATGTTTTAA |
| | AATGGACTATCATATGCTTACCGTAACTTGAAAGTATTTCGATTTCTTGGCTTTATA |
| | TATCTTGTGGAAAGGACGAAACACC (SEQ ID NO: 519) |
| Seq212 direct repeat | gtacaatagccctgcagtaaggcagggttctaAGAC (SEQ ID NO: 213) |
| Spacer (CTG guide 3) | CAGCAGCAGCAGCAGCAGCAGCAGCA (SEQ ID NO: 459) |
| EFS promoter | TAGGTCTTGAAAGGAGTGGGAATTGGCTCCGGTGCCCGTCAGTGGGCAGAGCGCA |
| | CATCGCCCACAGTCCCCGAGAAGTTGGGGGGAGGGGTCGGCAATTGATCCGGTGC |
| | CTAGAGAAGGTGGCGCGGGGTAAACTGGGAAAGTGATGTCGTGTACTGGCTCCGC |
| | CTTTTTCCCGAGGGTGGGGGAGAACCGTATATAAGTGCAGTAGTCGCCGTGAACGT |
| | TCTTTTTCGCAACGGGTTTGCCGCCAGAACACAGG (SEQ ID NO: 520) |
| Kozak Sequence | gccgccaccATG (SEQ ID NO: 529) |
| Cas13d Seq212 | AAGAAGAAGCACCAGAGCGCCGCCGAGAAGAGGCAAGTGAAGAAGCTCAAGAAT |
| | CAAGAGAAGGCCCAGAAGTACGCTAGCGAGCCTTCCCCCCTCCAGAGCGATACAG |
| | CTGGCGTGGAATGCTCCCAGAAAAAGACAGTCGTCAGCCACATTGCCAGCTCCAA |
| | GACACTGGCCAAGGCTATGGGACTCAAATCCACACTGGTCATGGGCGACAAGCTG |
| | GTCATCACCAGCTTTGCTGCTAGCAAGGCTGTCGGAGGCGCTGGCTACAAAAGCG |
| | CTAACATTGAAAAAATCACAGATCTGCAAGGAAGGGTCATTGAGGAGCACGAAAG |
| | GATGTTTAGCGCCGATGTCGGAGAGAAAAATATCGAACTGAGCAAGAATGACTGC |
| | CACACCAACGTCAACAACCCCGTGGTGACCAACATCGGAAAGGATTACATCGGAC |
| | TGAAATCTAGGCTGGAGCAAGAGTTTTTCGGCAAGACATTCGAGAATGACAATCT |
| | GCATGTGCAGCTGGCCTACAATATCCTCGACATCAAGAAAATTCTGGGAACCTATG |
| | TGAACAATATCATTTATATCTTCTACAATCTGAATAGGGCTGGCACCGGCAGAGAT |
| | GAGAGGATGTATGACGACCTCATCGGCACACTGTACGCTTACAAACCCATGGAGG |
| | CTCAACAGACCTATCTGCTCAAAGGCGACAAGGATATGAGGAGGTTTGAGGAGGT |
| | GAAACAGCTGCTGCAAAACACCTCCGCTTACTATGTGTATTACGGCACACTGTTCG |
| | AGAAGGTGAAGGCTAAGAGCAAGAAGGAACAGAGGGCTAAGGAGGCCGAAATCG |
| | ACGCTTGTACCGCCCATAACTACGATGTGCTGAGACTGCTGTCCCTCATGAGGCAG |
| | CTGTGCATGCACTCCGTCGCTGGAACAGCCTTTAAGCTGGCTGAGTCCGCTCTGTT |
| | CAACATTGAGGATGTGCTCAGCGCCGATCTGAAGGAAATCCTCGATGAAGCCTTCT |
| | CCGGCGCCGTGAACAAGCTCAATGACGGATTCGTGCAGCACTCCGGCAACAATCT |
| | GTACGTGCTCCAGCAGCTGTACCCTAATGAGACCATCGAGAGAATCGCCGAGAAG |
| | TACTACAGACTCACCGTGAGGAAGGAGGATCTGAACATGGGAGTCAACATTAAAA |
| | AGCTGAGGGAGCTGATCGTGGGCCAATACTTTCCCGAGGTCCTCGACAAAGAATA |
| | CGACCTCTCCAAGAATGGAGACAGCGTGGTGACATACAGAAGCAAGATTTATACC |
| | GTGATGAATTACATTCTGCTGTATTACCTCGAGGACCACGACTCCAGCAGAGAAAG |
| | CATGGTCGAAGCTCTGAGACAAAACAGAGAGGGCGATGAAGGCAAGGAGGAGAT |
| | CTATAGACAGTTTGCCAAGAAGGTGTGGAACGGCGTGTCCGGACTGTTTGGCGTGT |
| | GTCTGAACCTCTTCAAGACCGAAAAGAGAAACAAGTTTAGGAGCAAAGTCGCCCT |
| | CCCCGATGTGTCCGGCGCTGCCTATATGCTCTCCTCCGAGAACATCGACTACTTTGT |
| | CAAGATGCTCTTCTTTGTGTGTAAGTTTCTGGATGGCAAAGAAATCAACGAGCTGC |
| | TGTGCGCTCTGATCAACAAATTTGATAATATTGCCGATATTCTGGATGCTGCCGCT |
| | CAATGTGGCTCCTCCGTCTGGTTCGTGGACAGCTATAGGTTCTTCGAGAGATCTAG |
| | GAGGATTAGCGCCCAGATTAGAATCGTGAAGAACATCGCTTCCAAGGATTTTAAG |
| | AAATCCAAGAAGGATTCCGATGAGAGCTACCCCGAGCAGCTGTATCTGGATGCTC |
| | TGGCTCTGCTCGGAGACGTCATCTCCAAGTACAAGCAGAATAGAGATGGCAGCGT |
| | CGTCATCGATGACCAAGGCAATGCCGTGCTGACAGAGCAATACAAGAGGTTTAGA |
| | TATGAATTTTTCGAGGAGATCAAGAGGGACGAAAGCGGCGGCATCAAGTACAAGA |
| | AGTCCGGAAAACCCGAGTACAACCATCAGAGAAGGAATTTTATTCTGAATAATGT |
| | GCTGAAAAGCAAATGGTTTTTCTATGTGGTGAAGTACAATAGGCCCAGCAGCTGC |
| | AGAGAACTGATGAAGAATAAGGAAATTCTGAGGTTCGTGCTGAGAGACATCCCCG |
| | ACTCCCAAGTGAGAAGATACTTTAAGGCCGTCCAAGGAGAGGAAGCTTACGCTAG |
| | CGCCGAAGCTATGAGGACAAGACTGGTCGACGCTCTGTCCCAATTTAGCGTCACA |
| | GCTTGTCTGGATGAAGTGGGCGGCATGACAGACAAGGAATTCGCCTCCCAGAGGG |
| | CCGTCGATAGCAAAGAAAAACTGAGAGCCATCATCAGACTGTATCTGACAGTCGC |
| | CTATCTGATTACCAAGAGCATGGTGAAGGTGAATACAAGGTTTAGCATTGCCTTTA |
| | GCGTGCTGGAGAGGGACTACTATCTGCTCATTGACGGCAAGAAGAAATCCAGCGA |
| | CTACACCGGAGAGGATATGCTGGCTCTGACCAGAAAATTTGTGGGCGAAGATGCT |
| | GGACTGTATAGAGAGTGGAAAGAGAAGAACGCTGAAGCCAAGGACAAATATTTTG |
| | ACAAGGCCGAAAGGAAGAAGGTGCTGAGACAGAACGATAAGATGATCAGAAAGA |
| | TGCACTTCACACCCCACTCCCTCAATTACGTCCAAAAGAATCTCGAAAGCGTCCAG |
| | AGCAACGGACTGGCCGCCGTCATCAAGGAATATAGAAATGCCGTCGCTCACCTCA |
| | ATATCATCAATAGACTGGACGAGTACATTGGCTCCGCTAGGGCTGATAGCTACTAC |
| | TCTCTGTACTGTTACTGCCTCCAAATGTATCTGAGCAAGAACTTCAGCGTGGGCTA |
| | CCTCATCAACGTGCAAAAGCAGCTGGAGGAGCACCACACCTACATGAAGGATCTC |
| | ATGTGGCTGCTCAACATCCCCTTCGCTTACAACCTCGCCAGATACAAAAATCTGTC |
| | CAACGAAAAACTCTTTTACGACGAGGAAGCCGCCGCCGAAAAGGCTGACAAGGCT |
| | GAGAACGAGAGAGGCGAA (SEQ ID NO: 540) |
| Linker | GGAAGC (SEQ ID NO: 531) |
| SV40 NLS | CCCAAGAAGAAAAGGAAGGTC (SEQ ID NO: 532) |
| SV-40 poly A | AACTTGTTTATTGCAGCTTATAATGGTTACAAATAAAGCAATAGCATCACAAATTT |
| | CACAAATAAAGCATTTTTTTCACTGCATTCTAGTTGTGGTTTGTCCAAACTCATCAA |
| | TGTATCTTA (SEQ ID NO: 533) |

[0579] In some embodiments, nucleic acid sequences encoding CUG-targeting Cas13d proteins of the disclosure are codon optimized nucleic acid sequences. In some embodiments, the codon optimized sequence encoding a CUG-targeting Cas13d protein exhibits at least 5%, at least 10%, at least 20%, at least 30%, at least 50%, at least 75%, at least 100%, at least 200%, at least 300%, at least 500%, or at least 1000% increased translation in a human subject relative to a wild-type or non-codon optimized nucleic acid sequence.

[0580] In some aspects, a codon optimized nucleic acid sequence encoding a CUG-targeting Cas13d protein such as those put forth in SEQ ID NOs: 518, 528, 534, 536, and 539 exhibits increased stability. In some aspects, a codon optimized nucleic acid sequence encoding a CUG-targeting Cas13d protein exhibits increased stability through increased resistance to hydrolysis. In some embodiments, the codon optimized sequence encoding a CUG-targeting Cas13d protein exhibits at least 5%, at least 10%, at least 20%, at least 30%, at least 50%, at least 75%, at least 100%, at least 200%, at least 300%, at least 500%, or at least 1000% increased stability relative to a wild-type or non-codon optimized nucleic acid sequence. In some embodiments, the codon optimized sequence encoding a CUG-targeting Cas13d protein exhibits at least 5%, at least 10%, at least 20%, at least 30%, at least 50%, at least 75%, at least 100%, at least 200%, at least 300%, at least 500%, or at least 1000% increased resistance to hydrolysis in a human subject relative to a wild-type or non-codon optimized nucleic acid sequence.

[0581] In some aspects, a codon optimized nucleic acid sequence encoding a CUG-targeting Cas13d protein such as those put forth in SEQ ID NOs: 518, 528, 534, 536, and 539, can comprise no donor splice sites. In some aspects, a codon optimized nucleic acid sequence encoding a CUG-targeting Cas13d protein can comprise no more than about one, or about two, or about three, or about four, or about five, or about six, or about seven, or about eight, or about nine, or about ten donor splice sites. In some aspects, a codon optimized nucleic acid sequence encoding a CUG-targeting Cas13d protein comprises at least one, or at least two, or at least three, or at least four, or at least five, or at least six, or at least seven, or at least eight, or at least nine, or at least ten fewer donor splice sites as compared to a non-codon optimized nucleic acid sequence encoding the CUG-targeting Cas13d protein.

[0582] Without wishing to be bound by theory, the removal of donor splice sites in the codon optimized nucleic acid sequence can unexpectedly and unpredictably increase expression of the CUG-targeting Cas13d protein in vivo, as cryptic splicing is prevented. Moreover, cryptic splicing may vary between different subjects, meaning that the expression level of the CUG-targeting Cas13d protein comprising donor splice sites may unpredictably vary between different subjects. Such unpredictability is unacceptable in the context of human therapy. Accordingly, the codon optimized nucleic acid sequences put forth in SEQ ID NOs: 518, 528, 534, 536, and 539, which lacks donor splice sites, unexpectedly and surprisingly allows for increased expression of the CUG-targeting Cas13d protein in human subjects and regularizes expression of the CUG-targeting Cas13d protein across different human subjects.

[0583] In some aspects, a codon optimized nucleic acid sequence encoding a CUG-targeting Cas13d protein, such as those put forth in SEQ ID NOs: 518, 528, 534, 536, and 539, can have a GC content that differs from the GC content of the non-codon optimized nucleic acid sequence encoding the CUG-targeting Cas13d protein. In some aspects, the GC content of a codon optimized nucleic acid sequence encoding a CUG-targeting Cas13d protein is more evenly distributed across the entire nucleic acid sequence, as compared to the non-codon optimized nucleic acid sequence encoding the CUG-targeting Cas13d protein.

[0584] Without wishing to be bound by theory, by more evenly distributing the GC content across the entire nucleic acid sequence, the codon optimized nucleic acid sequence exhibits a more uniform melting temperature (“Tm”) across the length of the transcript. The uniformity of melting temperature results unexpectedly in increased expression of the codon optimized nucleic acid in a human subject, as transcription and/or translation of the nucleic acid sequence occurs with less stalling of the polymerase and/or ribosome.

[0585] In some aspects, a codon optimized nucleic acid sequence encoding a CUG-targeting Cas13d protein, such as those put forth in SEQ ID NOs: 518, 528, 534, 536, and 539, can have fewer repressive microRNA target binding sites as compared to the non-codon optimized nucleic acid sequence encoding the CUG-targeting Cas13d protein. In some aspects, a codon optimized nucleic acid sequence encoding a CUG-targeting Cas13d protein can have at least one, or at least two, or at least three, or at least four, or at least five, or at least six, or at least seven, or at least eight, or at least nine, or at least ten, or at least ten fewer repressive microRNA target binding sites as compared to the non-codon optimized nucleic acid sequence the CUG-targeting Cas13d protein.

[0586] Without wishing to be bound by theory, by having fewer repressive microRNA target binding sites, the codon optimized nucleic acid sequence encoding a CUG-targeting Cas13d protein unexpectedly exhibits increased expression in a human subject.

### Fusion Proteins

[0587] In some embodiments of the compositions and methods of the disclosure, the composition comprises a sequence encoding a target RNA-binding fusion protein comprising (a) a sequence encoding a first RNA-binding polypeptide or portion thereof; and optionally (b) a sequence encoding a second RNA-binding polypeptide, wherein the first RNA-binding polypeptide binds a target RNA, and wherein the second RNA-binding polypeptide comprises RNA-nuclease activity.

[0588] In some embodiments, a target RNA-binding fusion protein is an RNA-guided target RNA-binding fusion protein. RNA-guided target RNA-binding fusion proteins comprise at least one RNA-binding polypeptide which corresponds to a gRNA which guides the RNA-binding polypeptide to target RNA. RNA-guided target RNA-binding fusion proteins include without limitation, RNA-binding polypeptides which are CRISPR/Cas-based RNA-binding polypeptides or portions thereof.

[0589] Signal Sequences

[0590] In some embodiments, a target RNA-binding fusion protein of the disclosure comprises a signal sequence. In some embodiments, a target RNA-binding fusion protein comprises one or more signal sequences. In some embodiments, the signal sequence is a nuclear localization sequence (NLS), a nuclear export signal (NES), or a combination thereof In some embodiments, the signal sequence comprises one or more nuclear localization sequences (NLSs). In some embodiments, one or more NLS sequence comprises a sequence listed in Table 8. In some embodiments, the NLS signal sequence is a SV40 NLS signal sequence. In some embodiments, the SV40 NLS signal sequence is PKKKRKV (SEQ ID NO: 437).

TABLE 8
Nuclear Localization Sequences of the disclosure

| Name | Amino acid Sequence | SEQ ID NO: |
|---|---|---|
| SV40-NLS | PKKKRKV | 437 |
| human H2B-NLS | GKKRKRSRK | 438 |
| yeast H2B-NLS | GKKRSKV | 439 |
| human p53-NLS | KRALPNNTSSSPQPKKKP | 440 |
| human-cmyc-NLS | PAAKRVKLD | 441 |
| human pRB-NLS | KRSAEGSNPPKPLKKLR | 442 |
| human Nucleoplasmin-NLS | KRPAATKKAGQAKKKKLDK | 443 |
| Human pRB-NLS (extended version) | DRVLKRSAEGSNPPKPLKKLR | 543 |

[0591] In some embodiments, the signal sequence comprises one or more NES sequences. In some embodiments, the one or more NES sequence comprises a sequence listed in Table 9.

TABLE 9
Nuclear Export Sequences of the disclosure

| | | SEQ ID |
|---|---|---|
| Name | Amino acid Sequence | NO: |
| HIV REV NES | LPPLERLTLD | 544 |
| Human PKI NES | LALKLAGLDI | 545 |

[0592] In some embodiments, a target RNA-binding fusion protein of the disclosure comprises a tag sequence. In some embodiments, the tag sequence is a FLAG tag. In some embodiments, the FLAG tag sequence is DYKDDDDK (SEQ ID NO: 436).

### Linker Sequences

[0593] In some embodiments, a target RNA-binding fusion protein comprises a linker sequence. In some embodiments, the linker sequence may comprise or consist of 1, 2, 3, 4, 5, 6, 7, 8, 9, 10, 15, 20, 25, 30, 35, 40, 45, 50 or any number of amino acids in between. In some embodiments, the linker sequence comprises a linker sequence listed in Table 10.

Table 10
Linker Sequences of the disclosure

| Linker Sequence (amino acid) | SEQ ID NO: |
|---|---|
| GGS | 410 |
| VDTANGS | 411 |
| VDTGNGS | 412 |
| SGSETPGTSESATPES | 413 |
| GGGGSGGGGS | 414 |
| GGGGSGGGGSGGGGS | 415 |
| GGGGSGGGGSGGGGSGG | 416 |
| GGS | |
| EAAAKEAAAK | 417 |
| EAAAKEAAAKEAAAK | 418 |
| EAAAKEAAAKEAAAKEAA | 419 |
| AK | |
| APAPAPAP | 420 |
| APAPAPAPAPAP | 421 |
| APAPAPAPAPAPAPAPAP | 422 |
| GGGGSEAAAK | 423 |
| EAAAKGGGGS | 424 |
| GGGGSGGGGSEAAAKEAA | 425 |
| AK | |
| EAAAKEAAAKGGGGSGGG | 426 |
| GS | |
| RQTSPDPCPQLPLVPR | 427 |
| VDTGNWF | 428 |
| VDTANGSVDTGNGS | 429 |
| ARNVEERLCL | 430 |
| AIELNPSNA | 431 |
| ICGSRNL | 432 |
| VLATDMSKH | 434 |
| FLRELPEP | 435 |
| LIPKDQYYC | 436 |
| AEAAAKEAAAKA | 620 |
| AEAAAKEAAAKEAAAKA | 621 |
| AEAAAKEAAAKEAAAKEAAAKA | 622 |
| YVEFEGEQGVDEGGVSGGGS | 623 |
| GSRNLDFQALEETTEYDGGY | 624 |
| ASSTSPVEISEWLDQKLTKSDRPEL | 625 |
| VNQCRRQSEDSTFYLG | 626 |
| AVSPLLLTTTNSSEGLSMGNY | 627 |
| LDEAYPGKKLLPDDPYEKACQ | 628 |
| SAAAATPAVRTVPQYKYAAGVRN | 629 |
| PQQHLNAQPQVTMQQPAVHVQ | |
| GQEPL | |
| GGGGSEAAAKGGGGS | 630 |
| GGGGSEAAAKGGGGSEAAAKGG | 631 |
| GGS | |
| GGGGSSGSETGGTSESATGESGG | 632 |
| GGS | |
| SGSETPGTSESATPES | 633 |

### Promoter Sequences

[0594] In aspects, CUG targeting compositions of the disclosure comprise a promoter sequence. In some embodiments, any promoter disclosed herein can be substituted for any of the other promoters recited in the RNA-targeting constructs disclosed herein. In some aspects, CUG targeting compositions comprise a truncated CAG (tCAG) promoter (SEQ ID NO: 385). In some aspects, CUG targeting compositions comprise a short EF1-alpha (EFS) promoter as set forth in SEQ ID NO: 520. In some aspects, CUG targeting compositions comprise a human U6 promoter as set forth in SEQ ID NO: 519. In some aspects, CUG targeting compositions comprise an EFS-UBB promoter set forth in SEQ ID NO: 609. In some aspects, CUG targeting compositions comprise a muscle specific promoter. In some aspects, the CUG-targeting compositions comprise a muscle specific promoter which is a desmin promoter set forth in SEQ ID NO: 568 (full-length), SEQ ID NO: 608 (full-length) or SEQ ID NO: 569 (truncated). In some aspects, CAG targeting compositions comprise a synapsin promoter set forth in SEQ ID NO:619. In some embodiments, promoter sequences of the disclosure comprise a human EF1-alpha core promoter (SEQ ID NO: 642). In some embodiments, promoter sequences of the disclosure comprise a modified UBB intron (SEQ ID NO: 643). In some embodiments, promoter sequences of the disclosure comprise a modified CMV enhancer sequence (SEQ ID NO: 644). In some embodiments, promoter sequences of the disclosure comprise an eCMV-EFS-UBB promoter sequence (SEQ ID NO: 645).

[0595] . In some embodiments, expression control by a promoter is constitutive or ubiquitous. Non-limiting exemplary promoters include a Pol III promoter such as, e.g., U6 and H1 promoters and/or a Pol II promoter e.g., SV40, CMV (optionally including the CMV enhancer), RSV (Rous Sarcoma Virus LTR promoter (optionally including RSV enhancer), CBA (hybrid CMV enhancer/chicken ß-actin), CAG (hybrid CMV enhancer fused to chicken ß-actin), truncated CAG, Cbh (hybrid CBA), EF-1a (human elongation factor alpha-1) or EFS (short intron-less EF-1 alpha), PGK (phosphoglycerol kinase), CEF (chicken embryo fibroblasts), UBC (ubiquitin C), GUSB (lysosomal enzyme beta-glucuronidase), UCOE (ubiquitous chromatin opening element), hAAT (alpha-1 antitrypsin), TBG (thyroxine binding globulin), Desmin (full-length or truncated), MCK (muscle creatine kinase), C5-12 (synthetic muscle promoter), CK8e (creatin kinase 8), NSE (neuron-specific enolase), Synapsin, Synapsin-1 (SYN-1), opsin, PDGF (platelet-derived growth factor), PDGF-A, MecP2 (methyl CpG-binding protein 2), CaMKII (Calcium/Calmodulin-dependent protein kinase II), mGluR2 (metabotropic glutamate receptor 2), NFL (neurofilament light), NFH (neurofilament heavy), nβ2, PPE (rat preproenkephalin), ENK (preproenkephalin), Preproenkephalin-neurofilament chimeric promoter, EAAT2 (glutamate transporter), GFAP (glial fibrillary acidic protein), MBP (myelin basic protein), human rhodopsin kinase promoter (hGRK1), ß-actin promoter, dihydrofolate reductase promoter, MHCK7 (hybrid promoter of enhancer/promoter regions of muscle creatine kinase and alpha myosin heavy-chain genes) and combinations thereof. An “enhancer” is a region of DNA that can be bound by activating proteins to increase the likelihood or frequency of transcription. Non-limiting exemplary enhancers and posttranscriptional regulatory elements include the CMV enhancer, MCK enhancer, R-U5′ segment in LTR of HTLV-1, SV40 enhancer, the intron sequence between exons 2 and 3 of rabbit ß-globin, and WPRE. In some embodiments an intron is used to enhance promoter activity such as a UBB intron. In some embodiments, the UBB intron is used with an EFS promoter. In some embodiments, enhancer sequences can be added in the 5′ or 3′ UTR. In some embodiments, a 5′ enhancer can be Hsp70 as set forth in SEQ ID NO: 652:

TAACGGCTAGCCTGAGGAGCTGCTGCGACAGTCCACTACCTTTTTCGAG
AGTGACTCCCGTTGTCCCAAGGCTTCCCAGAGCGAACCTGTGCGGCTGC
AGGCACCGGCGCGTCGAGTTTCCGGCGTCCGGAAGGACCGAGCTCTTCT
CGCGGATCCAGTGTTCCGTTTCCAGCCCCCAATCTCAGAGCGGAGCCGA
CAGAGAGCAGGGAACCGGC.

### Non-Guided RNA-Binding Fusion Proteins

[0596] In some embodiments, a target RNA-binding fusion protein is not an RNA-guided target RNA-binding fusion protein and as such comprises at least one RNA-binding polypeptide which is capable of binding a target RNA without a corresponding gRNA sequence. Such non-guided RNA-binding polypeptides include, without limitation, at least one RNA-binding protein or RNA-binding portion thereof which is a PUF (Pumilio and FBF homology family) protein. This type RNA-binding polypeptide can be used instead of a gRNA-guided RNA binding protein such as CRISPR/Cas. The unique RNA recognition mode of PUF proteins (named for Drosophila Pumilio and C. elegans fem-3 binding factor) that are involved in mediating mRNA stability and translation are well known in the art. The PUF domain of human Pumilio1, also known in the art, binds tightly to cognate RNA sequences and its specificity can be modified. It contains eight PUF modules that recognize eight consecutive RNA bases with each module recognizing a single base. Since two amino acid side chains in each module recognize the Watson-Crick edge of the corresponding base and determine the specificity of that module, a PUF protein can be designed to specifically bind most 8 to 16-nt RNA. Wang et al., Nat Methods. 2009; 6(11): 825-830. See also WO2012/068627 which is incorporated by reference herein in its entirety.

[0597] The modular nature of the PUF-RNA interaction has been used to rationally engineer the binding specificity of PUF domains (Cheong, C. G. & Hall, T. M. (2006) PNAS 103: 13635-13639; Wang, X. et al (2002) Cell 110: 501-512). However, only the successful design of PUF domains with modules that recognize adenine, guanine or uracil have been reported prior to the teachings of WO2012/06827 supra. While the wild-type PumHD does not bind cytosine (C), molecular engineering has shown that some of the Pum units can be mutated to bind C with good yield and specificity. See e.g., Dong, S. et al. Specific and modular binding code for cytosine recognition in Pumilio/FBF (PUF) RNA-binding domains, The Journal of biological chemistry 286, 26732-26742 (2011). Accordingly, PumHD is a modified version of the WT Pumilio protein that exhibits programmable binding to arbitrary 8-base sequences of RNA. Each of the eight units of PumHD can bind to all four RNA bases, and the RNA bases flanking the target sequence do not affect binding. See also the following for art-recognized RNA-binding rules of PUF design: Filipovska A, Razif M F, Nygdrd K K, & Rackham O. A universal code for RNA recognition by PUF proteins. Nature chemical biology, 7(7), 425-427 (2011); Filipovska A, & Rackham O. Modular recognition of nucleic acids by PUF, TALE and PPR proteins. Molecular Bio Systems, 8(3), 699-708 (2012); Abil Z, Denard CA, & Zhao H. Modular assembly of designer PUF proteins for specific post-transcriptional regulation of endogenous RNA. Journal of biological engineering, 8(1), 7 (2014); Zhao Y, Mao M, Zhang W, Wang J, Li H, Yang Y, Wang Z, & Wu J. Expanding RNA binding specificity and affinity of engineered PUF domains. Nucleic Acids Research, 46(9), 4771-4782 (2018); Shinoda K, Tsuji S, Futaki S, & Irnanishi M. Nested PUF Proteins: Extending Target RNA Elements for Gene Regulation. ChemBioChem, 19(2), 171176 (2018); Koh Y Y, Wang Y, Qiu C, Opperman L, Gross L, Tanaka Hall™, & Wickens M. Stacking Interactions in PUF-RNA Complexes. RNA, 17(4), 718-727 (2011).

[0598] As such, it is well known in the art that human PUM1 (1186 amino acids) contains an RNA-binding domain (RBD) in the C-terminus of the protein (also known as Pumilio homology domain PUM-HD amino acid 828-amino acid 1175) and that PUFs are based on the RBD of human PUM1. There are 8 structural modules of 36 amino acids (except module 7 which has 43 amino acids) for RNA binding and flanking N- and C-terminal regions important for protein structure and stability. Within each module, amino acids 12, 13, and 16 are important for RNA binding with 12 and 16 responsible for RNA base recognition. Amino acid 13 stacks with RNA bases and can be modified to tune specificity and affinity. Alternatively, the PUF design may maintain amino acid 13 as human PUM1's native residue. In some embodiments of the PUF(CUG) or PUMBY(CUG) compositions disclosed herein, amino acid 13 (for stacking) will be engineered with an H and in other embodiments, will be engineered with a Y. In some embodiments, stacking residues may be modified to improve binding and specificity. Recognition occurs in reverse orientation as N- to C-terminal PUF recognizes 3′ to 5′ RNA. Accordingly, PUF engineering of 8 modules (8PUF), as known in the art, mimics a human protein. An exemplary 8-mer RNA recognition (8PUF) would be designed as follows: R1′-R1-R2-R3-R4-R5-R6-R7-R8-R8′. In one embodiment, an 8PUF is used as the RBD. In another embodiment, a variation of the 8PUF design is used to create a 14-mer RNA recognition (14PUF) RBD, 15-mer RNA recognition (15PUF) RBD, or a 16-mer RNA recognition (16PUF) RBD. In another embodiment, the PUF can be engineered to comprise a 4-mer, 5-mer, 6-mer, 7-mer, 8-mer, 9-mer, 10-mer, 11-mer, 12-mer, 13-mer, 14-mer, 15-mer, 16-mer, 24-mer, 30-mer, 36-mer, or any number of modules between. Shinoda et al., 2018; Criscuolo et al., 2020. Repeats 1-8 of wild type human PUM1 are provided herewith at SEQ ID NOS: 462-469, respectively. The nucleic acid sequence encoding the PUF domain from human PUM1 is SEQ ID NO: 470 and the amino acid sequence of the PUF domain from human PUM1 amino acids 828-1176 is SEQ ID NO: 471. See also U.S. Pat. No. 9,580,714 which is incorporated herein in its entirety.

[0599] In some embodiments of the non-guided RNA-binding fusion proteins of the disclosure, the fusion protein comprises at least one RNA-binding protein or RNA-binding portion thereof which is a PUMBY (Pumilio-based assembly) protein. RNA-binding protein PumHD, which has been widely used in native and modified form for targeting RNA, has been engineered into a protein architecture designed to yield a set of four canonical protein modules, each of which targets one RNA base. These modules (i.e., Pumby, for Pumilio-based assembly) are concatenated in chains of varying composition and length, to bind desired target RNAs. In essence, PUMBY is a more simple and modular form of PumHD, in which a single protein unit of PumHD is concatenated into arrays of arbitrary size and binding sequence specificity. The specificity of such Pumby-RNA interactions is high, with undetectable binding of a Pumby chain to RNA sequences that bear three or more mismatches from the target sequence. Katarzyna et al., PNAS, 2016; 113(19): E2579-E2588. See also US 2016/0238593 which is incorporated by reference herein in its entirety.

[0600] In some embodiments of the compositions of the disclosure, the first RNA binding protein comprises a Pumilio and FBF (PUF) protein. In some embodiments, the first RNA binding protein comprises a Pumilio-based assembly (PUMBY) protein. In some embodiments, the PUF or PUMBY RNA-binding proteins are fused with a nuclease domain such as E17 (SEQ ID NO: 358). In another embodiment, the single vector comprises a dCas13d RNA-binding system fused with a nuclease domain from ZC3H12A, such as E17 (SEQ ID NO: 359).

[0601] In some embodiments of the compositions of the disclosure, at least one of the RNA-binding proteins or RNA-binding portions thereof is a PPR protein. PPR proteins (proteins with pentatricopeptide repeat (PPR) motifs derived from plants) are nuclear-encoded and exclusively controlled at the RNA level organelles (chloroplasts and mitochondria), cutting, translation, splicing, RNA editing, genes specifically acting on RNA stability. PPR proteins are typically a motif of 35 amino acids and have a structure in which a PPR motif is about 10 contiguous amino acids. The combination of PPR motifs can be used for sequence-selective binding to RNA. PPR proteins are often comprised of PPR motifs of about 10 repeat domains. PPR domains or RNA-binding domains may be configured to be catalytically inactive. WO 2013/058404 incorporated herein by reference in its entirety.

[0602] In some embodiments, the fusion protein disclosed herein comprises a linker between the at least two RNA-binding polypeptides. In some embodiments, the linker is a peptide linker. In one embodiment, the linker is VDTANGS (SEQ ID NO: 411). In some embodiments, the peptide linker comprises one or more repeats of the tri-peptide GGS. In other embodiments, the linker is a non-peptide linker. In some embodiments, the non-peptide linker comprises polyethylene glycol (PEG), polypropylene glycol (PPG), co-poly(ethylene/propylene) glycol, polyoxyethylene (POE), polyurethane, polyphosphazene, polysaccharides, dextran, polyvinyl alcohol, polyvinylpyrrolidones, polyvinyl ethyl ether, polyacryl amide, polyacrylate, polycyanoacrylates, lipid polymers, chitins, hyaluronic acid, heparin, or an alkyl linker.

[0603] In some embodiments, the at least one RNA-binding protein does not require multimerization for RNA-binding activity. In some embodiments, the at least one RNA-binding protein is not a monomer of a multimer complex. In some embodiments, a multimer protein complex does not comprise the RNA binding protein. In some embodiments, the at least one of RNA-binding protein selectively binds to a target sequence within the RNA molecule. In some embodiments, the at least one RNA-binding protein does not comprise an affinity for a second sequence within the RNA molecule. In some embodiments, the at least one RNA-binding protein does not comprise a high affinity for or selectively bind a second sequence within the RNA molecule. In some embodiments, the at least one RNA-binding protein comprises between 2 and 1300 amino acids, inclusive of the endpoints.

[0604] In some embodiments, the at least one RNA-binding protein of the fusion proteins disclosed herein further comprises a sequence encoding a nuclear localization signal (NLS). In some embodiments, a nuclear localization signal (NLS) is positioned at the N-terminus of the RNA binding protein. In some embodiments, the at least one RNA-binding protein comprises an NLS at a C-terminus of the protein. In some embodiments, the at least one RNA-binding protein further comprises a first sequence encoding a first NLS and a second sequence encoding a second NLS. In some embodiments, the first NLS or the second NLS is positioned at the N-terminus of the RNA-binding protein. In some embodiments, the at least one RNA-binding protein comprises the first NLS or the second NLS at a C-terminus of the protein. In some embodiments, the at least one RNA-binding protein further comprises an NES (nuclear export signal) or other peptide tag or secretory signal. In one embodiment, the tag is a FLAG tag.

[0605] In some embodiments, a fusion protein disclosed herein comprises the at least one RNA-binding protein as a first RNA-binding protein together with a second RNA-binding protein comprising or consisting of a nuclease domain.

[0606] In some embodiments, the second RNA-binding polypeptide is operably configured to the first RNA-binding polypeptide at the C-terminus of the first RNA-binding polypeptide. In some embodiments, the second RNA-binding polypeptide is operably configured to the first RNA-binding polypeptide at the N-terminus of the first RNA-binding polypeptide. In one embodiment, an exemplary fusion protein is a PUF or PUMBY-based first RNA-binding protein fused to a second RNA-binding protein which is a zinc-finger endonuclease known as ZC3H12A or truncation of it is shown in SEQ ID NO: 358 (also termed E17).

[0607] An exemplary 14-mer RNA recognition (14PUMBY) targeting

(SEQ ID NO: 454)
UGCUGCUGCUGCUG

comprises the amino acid sequence:

(SEQ ID NO: 547)
GRSRLLEDFRNNRYPNLQLREIAGHTEQLVQDQYGSYVIEHVLEHGRPE
DKSKIVAEIRGHTEQLVQDQYGNYVIQHVLEHGRPEDKSKIVAEIRGHT
EQLVQDQYGSYVIRHVLEHGRPEDKSKIVAEIRGHTEQLVQDQYGSYVI
EHVLEHGRPEDKSKIVAEIRGHTEQLVQDQYGNYVIQHVLEHGRPEDKS
KIVAEIRGHTEQLVQDQYGSYVIRHVLEHGRPEDKSKIVAEIRGHTEQL
VQDQYGSYVIEHVLEHGRPEDKSKIVAEIRGHTEQLVQDQYGNYVIQHV
LEHGRPEDKSKIVAEIRGHTEQLVQDQYGSYVIRHVLEHGRPEDKSKIV
AEIRGHTEQLVQDQYGSYVIEHVLEHGRPEDKSKIVAEIRGHTEQLVQD
QYGNYVIQHVLEHGRPEDKSKIVAEIRGHTEQLVQDQYGSYVIRHVLEH
GRPEDKSKIVAEIRGHTEQLVQDQYGSYVIEHVLEHGRPEDKSKIVAEI
RGHTEQLVQDQYGNYVIQHVLEHGRPEDKSKIVAEIRGHIATLRKYTYG
KHILAKLEKYYMKNGVDLG.

[0608] In some aspects, SEQ ID NO: 547 comprises an architecture proceeding from the N-terminus to the C-terminus according to: R1′-R1-R2-R3-R4-R5-R6-R7-R8-R8′. In some aspects, SEQ ID NO: 547 is comprised of the sequences detailed in Table 11.

TABLE 11
8PUF protein according to SEQ ID NO: 547

| PUF | RNA | | SEQ ID |
|---|---|---|---|
| Module | Recognition | Amino Acid Sequence | NO |
| PUF R1′ | — | GRSRLLEDFRNNRYPNLQLREIAG | 495 |
| PUF R1 | G | HIMEFSQDQHGSRFIELKLERATPAERQLVFNEILQ | 498 |
| PUF R2 | U | AAYQLMVDVFGNYVIQKFFEFGSLEQKLALAERIRG | 490 |
| PUF R3 | C | HVLSLALQMYGSYVIRKALEFIPSDQQNEMVRELDG | 508 |
| PUF R4 | G | HVLKCVKDQNGSYVVEKCIECVQPQSLQFIIDAFKG | 504 |
| PUF R5 | U | QVFALSTHPYGNRVIQRILEHCLPDQTLPILEELHQ | 512 |
| PUF R6 | C | HTEQLVQDQYGSYVIRHVLEHGRPEDKSKIVAEIRG | 502 |
| PUF R7 | G | NVLVLSQHKFASNVVEKCVTHASRTERAVLIDEVCTMN | 510 |
| | | DGPHS | |
| PUF R8 | U | ALYTMMKDQYANYVVQKMIDVAEPGQRKIVMHKIRP | 493 |
| PUF R8′ | — | HIATLRKYTYGKHILAKLEKYYMKNGVDLG | 496 |

[0609] An exemplary 14-mer RNA recognition (14PUMBY) targeting

(SEQ ID NO: 454)
UGCUGCUGCUGCUG

comprises the amino acid sequence:

(SEQ ID NO: 547)
GRSRLLEDFRNNRYPNLQLREIAGHTEQLVQDQYGSYVIEHVLEHGRPE
DKSKIVAEIRGHTEQLVQDQYGNYVIQHVLEHGRPEDKSKIVAEIRGHT
EQLVQDQYGSYVIRHVLEHGRPEDKSKIVAEIRGHTEQLVQDQYGSYVI
EHVLEHGRPEDKSKIVAEIRGHTEQLVQDQYGNYVIQHVLEHGRPEDKS
KIVAEIRGHTEQLVQDQYGSYVIRHVLEHGRPEDKSKIVAEIRGHTEQL
VQDQYGSYVIEHVLEHGRPEDKSKIVAEIRGHTEQLVQDQYGNYVIQHV
LEHGRPEDKSKIVAEIRGHTEQLVQDQYGSYVIRHVLEHGRPEDKSKIV
AEIRGHTEQLVQDQYGSYVIEHVLEHGRPEDKSKIVAEIRGHTEQLVQD
QYGNYVIQHVLEHGRPEDKSKIVAEIRGHTEQLVQDQYGSYVIRHVLEH
GRPEDKSKIVAEIRGHTEQLVQDQYGSYVIEHVLEHGRPEDKSKIVAEI
RGHTEQLVQDQYGNYVIQHVLEHGRPEDKSKIVAEIRGHIATLRKYTYG
KHILAKLEKYYMKNGVDLG.

In some aspects, SEQ ID NO: 547 comprises an architecture proceeding from the N-terminus to the C-terminus according to: R1′-R6-R6-R6-R6-R6-R6-R6-R6-R6-R6-R6-R6-R6-R6-R8′. In some aspects, SEQ ID NO: 547 is comprised of the sequences detailed in Table 12.

TABLE 12
14Pumby protein according to SEQ ID NO: 547

| PUF | RNA | | SEQ ID |
|---|---|---|---|
| Module | Recognition | Amino Acid Sequence | NO: |
| PUF R1′ | — | GRSRLLEDFRNNRYPNLQLREIAG | 495 |
| R6 | G | HTEQLVQDQYGSYVIEHVLEHGRPEDKSKIVAEIRG | 501 |
| R6 | U | HTEQLVQDQYGNYVIQHVLEHGRPEDKSKIVAEIRG | 500 |
| R6 | C | HTEQLVQDQYGSYVIRHVLEHGRPEDKSKIVAEIRG | 502 |
| R6 | G | HTEQLVQDQYGSYVIEHVLEHGRPEDKSKIVAEIRG | 501 |
| R6 | U | HTEQLVQDQYGNYVIQHVLEHGRPEDKSKIVAEIRG | 500 |
| R6 | C | HTEQLVQDQYGSYVIRHVLEHGRPEDKSKIVAEIRG | 502 |
| R6 | G | HTEQLVQDQYGSYVIEHVLEHGRPEDKSKIVAEIRG | 501 |
| R6 | U | HTEQLVQDQYGNYVIQHVLEHGRPEDKSKIVAEIRG | 500 |
| R6 | C | HTEQLVQDQYGSYVIRHVLEHGRPEDKSKIVAEIRG | 502 |
| R6 | G | HTEQLVQDQYGSYVIEHVLEHGRPEDKSKIVAEIRG | 501 |
| R6 | U | HTEQLVQDQYGNYVIQHVLEHGRPEDKSKIVAEIRG | 500 |
| R6 | C | HTEQLVQDQYGSYVIRHVLEHGRPEDKSKIVAEIRG | 502 |
| R6 | G | HTEQLVQDQYGSYVIEHVLEHGRPEDKSKIVAEIRG | 501 |
| R6 | U | HTEQLVQDQYGNYVIQHVLEHGRPEDKSKIVAEIRG | 500 |
| PUF R8′ | — | HIATLRKYTYGKHILAKLEKYYMKNGVDLG | 496 |

[0610] An exemplary 14-mer RNA recognition (14PUMBY) targeting

(SEQ ID NO: 473)
CUGCUGCUGCUGCU

comprises the amino acid sequence:

(SEQ ID NO: 548)
GRSRLLEDFRNNRYPNLQLREIAGHTEQLVQDQYGNYVIQHVLEHGRPE
DKSKIVAEIRGHTEQLVQDQYGSYVIRHVLEHGRPEDKSKIVAEIRGHT
EQLVQDQYGSYVIEHVLEHGRPEDKSKIVAEIRGHTEQLVQDQYGNYVI
QHVLEHGRPEDKSKIVAEIRGHTEQLVQDQYGSYVIRHVLEHGRPEDKS
KIVAEIRGHTEQLVQDQYGSYVIEHVLEHGRPEDKSKIVAEIRGHTEQL
VQDQYGNYVIQHVLEHGRPEDKSKIVAEIRGHTEQLVQDQYGSYVIRHV
LEHGRPEDKSKIVAEIRGHTEQLVQDQYGSYVIEHVLEHGRPEDKSKIV
AEIRGHTEQLVQDQYGNYVIQHVLEHGRPEDKSKIVAEIRGHTEQLVQD
QYGSYVIRHVLEHGRPEDKSKIVAEIRGHTEQLVQDQYGSYVIEHVLEH
GRPEDKSKIVAEIRGHTEQLVQDQYGNYVIQHVLEHGRPEDKSKIVAEI
RGHTEQLVQDQYGSYVIRHVLEHGRPEDKSKIVAEIRGHIATLRKYTYG
KHILAKLEKYYMKNGVDLG.

In some aspects, SEQ ID NO: 548 comprises an architecture proceeding from the N-terminus to the C-terminus according to: R1′-R6-R6-R6-R6-R6-R6-R6-R6-R6-R6-R6-R6-R6-R6-R8′. In some aspects, SEQ ID NO: 548 is comprised of the sequences detailed in Table 13.

TABLE 13
14Pumby protein according to SEQ ID NO: 548

| PUF | RNA | | SEQ ID |
|---|---|---|---|
| Module | Recognition | Amino Acid Sequence | NO: |
| PUF R1′ | | GRSRLLEDFRNNRYPNLQLREIAG | 495 |
| R6 | U | HTEQLVQDQYGNYVIQHVLEHGRPEDKSKIVAEIRG | 500 |
| R6 | C | HTEQLVQDQYGSYVIRHVLEHGRPEDKSKIVAEIRG | 502 |
| R6 | G | HTEQLVQDQYGSYVIEHVLEHGRPEDKSKIVAEIRG | 501 |
| R6 | U | HTEQLVQDQYGNYVIQHVLEHGRPEDKSKIVAEIRG | 500 |
| R6 | C | HTEQLVQDQYGSYVIRHVLEHGRPEDKSKIVAEIRG | 502 |
| R6 | G | HTEQLVQDQYGSYVIEHVLEHGRPEDKSKIVAEIRG | 501 |
| R6 | U | HTEQLVQDQYGNYVIQHVLEHGRPEDKSKIVAEIRG | 500 |
| R6 | C | HTEQLVQDQYGSYVIRHVLEHGRPEDKSKIVAEIRG | 502 |
| R6 | G | HTEQLVQDQYGSYVIEHVLEHGRPEDKSKIVAEIRG | 501 |
| R6 | U | HTEQLVQDQYGNYVIQHVLEHGRPEDKSKIVAEIRG | 500 |
| R6 | C | HTEQLVQDQYGSYVIRHVLEHGRPEDKSKIVAEIRG | 502 |
| R6 | G | HTEQLVQDQYGSYVIEHVLEHGRPEDKSKIVAEIRG | 501 |
| R6 | U | HTEQLVQDQYGNYVIQHVLEHGRPEDKSKIVAEIRG | 500 |
| R6 | C | HTEQLVQDQYGSYVIRHVLEHGRPEDKSKIVAEIRG | 502 |
| PUF R8′ | | HIATLRKYTYGKHILAKLEKYYMKNGVDLG | 496 |

[0611] An exemplary 14-mer RNA recognition (14PUMBY) targeting

(SEQ ID NO: 477)
GCUGCUGCUGCUGC

comprises the amino acid sequence:

(SEQ ID NO: 558)
GRSRLLEDFRNNRYPNLQLREIAGHTEQLVQDQYGSYVIRHVLEHGRPE
DKSKIVAEIRGHTEQLVQDQYGSYVIEHVLEHGRPEDKSKIVAEIRGHT
EQLVQDQYGNYVIQHVLEHGRPEDKSKIVAEIRGHTEQLVQDQYGSYVI
RHVLEHGRPEDKSKIVAEIRGHTEQLVQDQYGSYVIEHVLEHGRPEDKS
KIVAEIRGHTEQLVQDQYGNYVIQHVLEHGRPEDKSKIVAEIRGHTEQL
VQDQYGSYVIRHVLEHGRPEDKSKIVAEIRGHTEQLVQDQYGSYVIEHV
LEHGRPEDKSKIVAEIRGHTEQLVQDQYGNYVIQHVLEHGRPEDKSKIV
AEIRGHTEQLVQDQYGSYVIRHVLEHGRPEDKSKIVAEIRGHTEQLVQD
QYGSYVIEHVLEHGRPEDKSKIVAEIRGHTEQLVQDQYGNYVIQHVLEH
GRPEDKSKIVAEIRGHTEQLVQDQYGSYVIRHVLEHGRPEDKSKIVAEI
RGHTEQLVQDQYGSYVIEHVLEHGRPEDKSKIVAEIRGHIATLRKYTYG
KHILAKLEKYYMKNGVDLG.

In some aspects, SEQ ID NO: 558 comprises an architecture proceeding from the N-terminus to the C-terminus according to: R1′-R6-R6-R6-R6-R6-R6-R6-R6-R6-R6-R6-R6-R6-R6-R8′. In some aspects, SEQ ID NO: 558 is comprised of the sequences detailed in Table 14.

TABLE 14
14Pumby protein according to SEQ ID NO: 558

| PUF | RNA | | SEQ ID |
|---|---|---|---|
| Module | Recognition | Amino Acid Sequence | NO: |
| PUF R1′ | — | GRSRLLEDFRNNRYPNLQLREIAG | 495 |
| R6 | C | HTEQLVQDQYGSYVIRHVLEHGRPEDKSKIVAEIRG | 502 |
| R6 | G | HTEQLVQDQYGSYVIEHVLEHGRPEDKSKIVAEIRG | 501 |
| R6 | U | HTEQLVQDQYGNYVIQHVLEHGRPEDKSKIVAEIRG | 500 |
| R6 | C | HTEQLVQDQYGSYVIRHVLEHGRPEDKSKIVAEIRG | 502 |
| R6 | G | HTEQLVQDQYGSYVIEHVLEHGRPEDKSKIVAEIRG | 501 |
| R6 | U | HTEQLVQDQYGNYVIQHVLEHGRPEDKSKIVAEIRG | 500 |
| R6 | C | HTEQLVQDQYGSYVIRHVLEHGRPEDKSKIVAEIRG | 502 |
| R6 | G | HTEQLVQDQYGSYVIEHVLEHGRPEDKSKIVAEIRG | 501 |
| R6 | U | HTEQLVQDQYGNYVIQHVLEHGRPEDKSKIVAEIRG | 500 |
| R6 | C | HTEQLVQDQYGSYVIRHVLEHGRPEDKSKIVAEIRG | 502 |
| R6 | G | HTEQLVQDQYGSYVIEHVLEHGRPEDKSKIVAEIRG | 501 |
| R6 | U | HTEQLVQDQYGNYVIQHVLEHGRPEDKSKIVAEIRG | 500 |
| R6 | C | HTEQLVQDQYGSYVIRHVLEHGRPEDKSKIVAEIRG | 502 |
| R6 | G | HTEQLVQDQYGSYVIEHVLEHGRPEDKSKIVAEIRG | 501 |
| PUF R8′ | | HIATLRKYTYGKHILAKLEKYYMKNGVDLG | 496 |

[0612] An exemplary 8-mer RNA recognition (8PUF) targeting

(SEQ ID NO: 453)
UGCUGCUG

comprises the amino acid sequence:

(SEQ ID NO: 444)
GRSRLLEDFRNNRYPNLQLREIAGHIMEFSQDQHGSRFIEL
KLERATPAERQLVFNEILQAAYQLMVDVFGNYVIQKFFEF
GSLEQKLALAERIRGHVLSLALOMYGSYVIRKALEFIPSD
QQNEMVRELDGHVLKCVKDQNGSYVVEKCIECVQPQSLQF
IIDAFKGQVFALSTHPYGNRVIQRILEHCLPDQTLPILEE
LHQHTEQLVQDQYGSYVIRHVLEHGRPEDKSKIVAEIRGN
VLVLSQHKFASNVVEKCVTHASRTERAVLIDEVCTMNDGP
HSALYTMMKDQYANYVVQKMIDVAEPGQRKIVMHKIRPHI
ATLRKYTYGKHILAKLEKYYMKNGVDLG.

In some aspects, SEQ ID NO: 444 comprises an architecture proceeding from the N-terminus to the C-terminus according to: R1′-R1-R2-R3-R4-R5-R6-R7-R8-R8′. In some aspects, SEQ ID NO: 444 is comprised of the sequences detailed in Table 15.

TABLE 15
8PUF protein according to SEQ ID NO: 444

| | | | SEQ |
|---|---|---|---|
| PUF | RNA | Amino Acid | ID |
| Module | Recognition | Sequence | NO: |
| PUF R1′ | — | GRSRLLEDFR | 495 |
| | | NNRYPNLQLR | |
| | | EIAG | |
| PUF R1 | G | HIMEFSQDQH | 498 |
| | | GSRFIELKLE | |
| | | RATPAERQLV | |
| | | FNEILQ | |
| PUF R2 | U | AAYQLMVDVF | 490 |
| | | GNYVIQKFFE | |
| | | FGSLEQKLAL | |
| | | AERIRG | |
| PUF R3 | C | HVLSLALQMY | 507 |
| | | GSYVIRKALE | |
| | | FIPSDQQNEM | |
| | | VRELDG | |
| PUF R4 | G | HVLKCVKDQN | 503 |
| | | GSYVVEKCIE | |
| | | CVQPQSLQFI | |
| | | IDAFKG | |
| PUF R5 | U | QVFALSTHPY | 511 |
| | | GNRVIQRIL | |
| | | EHCLPDQTLP | |
| | | ILEELHQ | |
| PUF R6 | C | HTEQLVQDQY | 501 |
| | | GSYVIRHVLE | |
| | | HGRPEDKSKI | |
| | | VAEIRG | |
| PUF R7 | G | NVLVLSQHKF | 509 |
| | | ASNVVEKCVT | |
| | | HASRTERAVL | |
| | | IDEVCTMNDG | |
| | | PHS | |
| PUF R8 | U | ALYTMMKDQY | 493 |
| | | ANYVVQKMID | |
| | | VAEPGQRKIV | |
| | | MHKIRP | |
| PUF R8′ | — | HIATLRKYTY | 496 |
| | | GKHILAKLEK | |
| | | YYMKNGVDLG | |

[0613] In some embodiments, nucleic acid sequences encoding PUF proteins of the disclosure are codon optimized nucleic acid sequences. In some embodiments, the codon optimized sequence encoding a PUF protein exhibits at least 5%, at least 10%, at least 20%, at least 30%, at least 50%, at least 75%, at least 100%, at least 200%, at least 300%, at least 500%, or at least 1000% increased expression in a human subject relative to a wild-type or non-codon optimized nucleic acid sequence. In some embodiments, an 8PUF protein of the disclosure is encoded by a nucleic acid sequences comprising SEQ ID NO: 452. In some embodiments, a nucleotide sequence encoding a fusion protein comprising a CUG targeting 8PUF and an E17 nuclease comprises SEQ ID NO: 460. In some embodiments, a nucleotide sequence encoding a CUG-targeting fusion protein comprises, from 5′ to 3′: a flag tag, SV-40 nuclear localization sequence, an 8PUF, and an E17 nuclease is set forth in SEQ ID NO: 515. In some embodiments, a nucleotide sequence encoding a CUG-targeting fusion protein comprises, from 5′ to 3′: a SV-40 nuclear localization sequence, an 8PUF, and an E17 nuclease is set forth in SEQ ID NO: 517. In some embodiments, a nucleotide sequence encoding a CUG-targeting fusion protein comprises, from 5′ to 3′: an 8PUF and an E17 nuclease is set forth in SEQ ID NO: 516.

[0614] In some embodiments, nucleic acid sequences encoding PUF proteins of the disclosure are codon optimized nucleic acid sequences. In some embodiments, the codon optimized sequence encoding a PUF protein exhibits at least 5%, at least 10%, at least 20%, at least 30%, at least 50%, at least 75%, at least 100%, at least 200%, at least 300%, at least 500%, or at least 1000% increased translation in a human subject relative to a wild-type or non-codon optimized nucleic acid sequence.

[0615] In some aspects, a codon optimized nucleic acid sequence encoding a PUF protein such as those put forth in SEQ ID NOs: 452 and 515-517exhibits increased stability. In some aspects, a codon optimized nucleic acid sequence encoding a PUF protein exhibits increased stability through increased resistance to hydrolysis. In some embodiments, the codon optimized sequence encoding a PUF protein exhibits at least 5%, at least 10%, at least 20%, at least 30%, at least 50%, at least 75%, at least 100%, at least 200%, at least 300%, at least 500%, or at least 1000% increased stability relative to a wild-type or non-codon optimized nucleic acid sequence. In some embodiments, the codon optimized sequence encoding a PUF protein exhibits at least 5%, at least 10%, at least 20%, at least 30%, at least 50%, at least 75%, at least 100%, at least 200%, at least 300%, at least 500%, or at least 1000% increased resistance to hydrolysis in a human subject relative to a wild-type or non-codon optimized nucleic acid sequence.

[0616] In some aspects, a codon optimized nucleic acid sequence encoding a PUF protein such as those put forth in SEQ ID NOs: 452 and 515-517, can comprise no donor splice sites. In some aspects, a codon optimized nucleic acid sequence encoding a PUF protein can comprise no more than about one, or about two, or about three, or about four, or about five, or about six, or about seven, or about eight, or about nine, or about ten donor splice sites. In some aspects, a codon optimized nucleic acid sequence encoding a PUF protein comprises at least one, or at least two, or at least three, or at least four, or at least five, or at least six, or at least seven, or at least eight, or at least nine, or at least ten fewer donor splice sites as compared to a non-codon optimized nucleic acid sequence encoding the PUF protein.

[0617] Without wishing to be bound by theory, the removal of donor splice sites in the codon optimized nucleic acid sequence can unexpectedly and unpredictably increase expression of the PUF protein in vivo, as cryptic splicing is prevented. Moreover, cryptic splicing may vary between different subjects, meaning that the expression level of the PUF protein comprising donor splice sites may unpredictably vary between different subjects. Such unpredictability is unacceptable in the context of human therapy. Accordingly, the codon optimized nucleic acid sequences put forth in SEQ ID NOs: 452 and 515-517, which lacks donor splice sites, unexpectedly and surprisingly allows for increased expression of the PUF protein in human subjects and regularizes expression of the PUF protein across different human subjects.

[0618] In some aspects, a codon optimized nucleic acid sequence encoding a PUF protein, such as those put forth in SEQ ID NOs: 452 and 515-517, can have a GC content that differs from the GC content of the non-codon optimized nucleic acid sequence encoding the PUF protein. In some aspects, the GC content of a codon optimized nucleic acid sequence encoding a PUF protein is more evenly distributed across the entire nucleic acid sequence, as compared to the non-codon optimized nucleic acid sequence encoding the PUF protein.

[0619] Without wishing to be bound by theory, by more evenly distributing the GC content across the entire nucleic acid sequence, the codon optimized nucleic acid sequence exhibits a more uniform melting temperature (“Tm”) across the length of the transcript. The uniformity of melting temperature results unexpectedly in increased expression of the codon optimized nucleic acid in a human subject, as transcription and/or translation of the nucleic acid sequence occurs with less stalling of the polymerase and/or ribosome.

[0620] In some aspects, a codon optimized nucleic acid sequence encoding a PUF protein, such as those put forth in SEQ ID NOs: 452 and 515-517, can have fewer repressive microRNA target binding sites as compared to the non-codon optimized nucleic acid sequence encoding the PUF protein. In some aspects, a codon optimized nucleic acid sequence encoding a PUF protein can have at least one, or at least two, or at least three, or at least four, or at least five, or at least six, or at least seven, or at least eight, or at least nine, or at least ten, or at least ten fewer repressive microRNA target binding sites as compared to the non-codon optimized nucleic acid sequence the PUF protein.

[0621] Without wishing to be bound by theory, by having fewer repressive microRNA target binding sites, the codon optimized nucleic acid sequence encoding a PUF protein unexpectedly exhibits increased expression in a human subject.

[0622] In some embodiments, an 8PUF protein can be encoded by a nucleic acid sequence comprising:

(SEQ ID NO: 452)
GGACGAAGCCGACTCTTGGAAGACTTCAGAAACAATCGGT
ATCCGAACCTTCAGCTGAGAGAAATTGCTGGTCACATCAT
GGAATTTTCTCAAGATCAACATGGAAGCCGGTTTATTGAA
CTTAAACTCGAACGAGCCACCCCGGCCGAAAGGCAATTGG
TGTTCAATGAAATTCTTCAGGCCGCATACCAACTCATGGT
TGATGTTTTTGGGAACTATGTTATTCAAAAGTTTTTTGAG
TTCGGGTCACTGGAGCAAAAGTTGGCATTGGCAGAGCGAA
TCCGGGGCCATGTTCTGAGCCTCGCTCTCCAAATGTACGG
TAGTTATGTCATTCGCAAAGCACTCGAGTTCATACCATCA
GATCAACAGAATGAGATGGTGCGGGAGCTGGATGGGCATG
TTTTGAAATGCGTGAAAGACCAAAACGGTAGCTACGTAGT
TGAGAAATGCATCGAATGCGTCCAACCACAGTCTCTCCAA
TTTATTATAGATGCATTTAAGGGTCAGGTTTTCGCGCTTT
CTACGCACCCGTATGGGAACCGAGTGATTCAGAGAATCTT
GGAGCACTGCCTGCCGGATCAGACACTCCCTATCTTGGAG
GAATTGCACCAGCATACCGAACAATTGGTGCAAGATCAAT
ACGGTTCATATGTTATTCGGCACGTTCTTGAGCATGGAAG
GCCAGAGGACAAGTCAAAGATCGTCGCTGAGATTAGAGGT
AACGTATTGGTGCTCTCACAACACAAATTTGCATCTAATG
TGGTGGAGAAATGTGTTACTCATGCTTCTAGAACGGAAAG
GGCAGTTCTCATAGACGAAGTTTGCACAATGAATGATGGT
CCTCATAGCGCACTTTATACCATGATGAAGGACCAGTATG
CAAACTATGTCGTCCAGAAAATGATCGATGTGGCGGAGCC
CGGTCAACGGAAAATCGTGATGCACAAAATCCGACCTCAC
ATTGCTACACTCAGAAAATACACGTATGGAAAACATATTC
TGGCTAAGCTGGAGAAATATTACATGAAGAATGGAGTGGA
TCTGGGG.

[0623] An exemplary 14-mer RNA recognition (14PUF) targeting

(SEQ ID NO: 454)
UGCUGCUGCUGCUG

comprises the amino acid sequence:

(SEQ ID NO: 445)
GRSRLLEDFRNNRYPNLQLREIAGHIMEFSQDQHGSRFIE
LKLERATPAERQLVFNEILQAAYQLMVDVFGNYVIQKFFE
FGSLEQKLALAERIRGHVLSLALQMYGSYVIRKALEFIPS
DQQNEMVRELDGHVLKCVKDQNGSYVVEKCIECVQPQSLQ
FIIDAFKGQVFALSTHPYGNRVIQRILEHCLPDQTLPILE
ELHQHIMEFSQDQHGSRFIRLKLERATPAERQLVFNEILQ
AAYQLMVDVFGSYVIEKFFEFGSLEQKLALAERIRGHVLS
LALQMYGNRVIQKALEFIPSDQQNEMVRELDGHVLKCVKD
QNGSYVVRKCIECVQPQSLQFIIDAFKGQVFALSTHPYGS
RVIERILEHCLPDQTLPILEELHQHTEQLVQDQYGNYVIQ
HVLEHGRPEDKSKIVAEIRGHTEQLVQDQYGSYVIRHVL
EHGRPEDKSKIVAEIRGNVLVLSQHKFASNVVEKCVTHAS
RTERAVLIDEVCTMNDGPHSALYTMMKDQYANYVVQKMID
VAEPGQRKIVMHKIRPHIATLRKYTYGKHILAKLEKYYMK
NGVDLG

In some aspects, SEQ ID NO: 445 comprises an architecture proceeding from the N-terminus to the C-terminus according to: R1′-R1-R2-R3-R4-R5-R1-R2-R3-R4-R5-R6-R6-R7-R8-R8′. In some aspects, SEQ ID NO: 445 is comprised of the sequences detailed in Table 16.

TABLE 16
14PUF protein according to SEQ ID NO: 445

| | | | SEQ |
|---|---|---|---|
| PUF | RNA | Amino Acid | ID |
| Module | Recognition | Sequence | NO |
| PUF R1′ | — | GRSRLLEDFRNNRYP | 495 |
| | | NLQLREIAG | |
| PUF R1 | G | HIMEFSQDQHGSRFI | 498 |
| | | ELKLERATPAERQLV | |
| | | FNEILQ | |
| PUF R2 | U | AAYQLMVDVFGNYVI | 490 |
| | | QKFFEFGSLEQKLAL | |
| | | AERIRG | |
| PUF R3 | C | HVLSLALQMYGSYVI | 507 |
| | | RKALEFIPSDQQNEM | |
| | | VRELDG | |
| PUF R4 | G | HVLKCVKDQNGSYVV | 503 |
| | | EKCIECVQPQSLQFI | |
| | | IDAFKG | |
| PUF R5 | U | QVFALSTHPYGNRV | 511 |
| | | IQRILEHCLPDQTLP | |
| | | ILEELHQ | |
| PUF R1 | C | HIMEFSQDQHGSRFI | 498 |
| | | RLKLERATPAERQLV | |
| | | FNEILQ | |
| PUF R2 | G | AAYQLMVDVFGSYVI | 491 |
| | | EKFFEFGSLEQKLAL | |
| | | AERIRG | |
| PUF R3 | U | HVLSLALQMYGNRVI | 505 |
| | | QKALEFIPSDQQNEM | |
| | | VRELDG | |
| PUF R4 | C | HVLKCVKDQNGSYVV | 504 |
| | | RKCIECVQPQSLQFI | |
| | | IDAFKG | |
| PUF R5 | G | QVFALSTHPYGSRV | 512 |
| | | IERILEHCLPDQTLP | |
| | | ILEELHQ | |
| PUF R6 | U | HTEQLVQDQYGNYVI | 499 |
| | | QHVLEHGRPEDKSKI | |
| | | VAEIRG | |
| PUF R6 | C | HTEQLVQDQYGSYVI | 501 |
| | | RHVLEHGRPEDKSKI | |
| | | VAEIRG | |
| PUF R7 | G | NVLVLSQHKFASNVV | 509 |
| | | EKCVTHASRTERAVL | |
| | | IDEVCTMNDGPHS | |
| PUF R8 | U | ALYTMMKDQYANYVV | 493 |
| | | QKMIDVAEPGQRKIV | |
| | | MHKIRP | |
| PUF R8′ | — | HIATLRKYTYGKHIL | 496 |
| | | AKLEKYYMKNGVDLG | |

[0624] An exemplary 14-mer RNA recognition (14PUF) targeting

(SEQ ID NO: 454)
UGCUGCUGCUGCUG

comprises the amino acid sequence:

(SEQ ID NO: 446)
GRSRLLEDFRNNRYPNLQLREIAGHIMEFSQDQHGSRFIEL
KLERATPAERQLVFNEILQAAYQLMVDVFGNYVIQKFFEF
GSLEQKLALAERIRGHVLSLALQMYGSYVIRKALEFIPSD
QQNEMVRELDGHVLKCVKDQNGSYVVEKCIECVQPQSLQF
IIDAFKGQVFALSTHPYGNRVIQRILEHCLPDQTLPILEE
LHQHTEQLVQDQYGSYVIRHVLEHGRPEDKSKIVAEIRGH
IMEFSQDQHGSRFIELKLERATPAERQLVFNEILQAAYQL
MVDVFGNYVIQKFFEFGSLEQKLALAERIRGHVLSLALQM
YGSYVIRKALEFIPSDQQNEMVRELDGHVLKCVKDQNGSY
VVEKCIECVQPQSLQFIIDAFKGQVFALSTHPYGNRVIQR
ILEHCLPDQTLPILEELHQHTEQLVQDQYGSYVIRHVLEH
GRPEDKSKIVAEIRGNVLVLSQHKFASNVVEKCVTHASRT
ERAVLIDEVCTMNDGPHSALYTMMKDQYANYVVQKMIDVA
EPGQRKIVMHKIRPHIATLRKYTYGKHILAKLEKYYMKNG
VDLG.

In some aspects, SEQ ID NO: 446 comprises an architecture proceeding from the N-terminus to the C-terminus according to: R1′-R1-R2-R3-R4-R5-R6-R1-R2-R3-R4-R5-R6-R7-R8-R8′. In some aspects, SEQ ID NO: 446 is comprised of the sequences detailed in Table 17.

TABLE 17
14PUF protein according to SEQ ID NO: 446

| | | | SEQ |
|---|---|---|---|
| PUF | RNA | Amino Acid | ID |
| Module | Recognition | Sequence | NO |
| PUF R1′ | — | GRSRLLEDFRNNRYP | 495 |
| | | NLQLREIAG | |
| PUF R1 | G | HIMEFSQDQHGSRFI | 498 |
| | | ELKLERATPAERQLV | |
| | | FNEILQ | |
| PUF R2 | U | AAYQLMVDVFGNYVI | 490 |
| | | QKFFEFGSLEQKLAL | |
| | | AERIRG | |
| PUF R3 | C | HVLSLALQMYGSYVI | 507 |
| | | RKALEFIPSDQQNEM | |
| | | VRELDG | |
| PUF R4 | G | HVLKCVKDQNGSYVV | 503 |
| | | EKCIECVQPQSLQFI | |
| | | IDAFKG | |
| PUF R5 | U | QVFALSTHPYGNRVI | 511 |
| | | QRILEHCLPDQTLPI | |
| | | LEELHQ | |
| PUF R6 | C | HTEQLVQDQYGSYVI | 501 |
| | | RHVLEHGRPEDKSKI | |
| | | VAEIRG | |
| PUF R1 | G | HIMEFSQDQHGSRFI | 498 |
| | | ELKLERATPAERQLV | |
| | | FNEILQ | |
| PUF R2 | U | AAYQLMVDVFGNYVI | 490 |
| | | QKFFEFGSLEQKLAL | |
| | | AERIRG | |
| PUF R3 | C | HVLSLALQMYGSYVI | 507 |
| | | RKALEFIPSDQQNEM | |
| | | VRELDG | |
| PUF R4 | G | HVLKCVKDQNGSYVV | 503 |
| | | EKCIECVQPQSLQFI | |
| | | IDAFKG | |
| PUF R5 | U | QVFALSTHPYGNRVI | 511 |
| | | QRILEHCLPDQTLPI | |
| | | LEELHQ | |
| PUF R6 | C | HTEQLVQDQYGSYVI | 501 |
| | | RHVLEHGRPEDKSKI | |
| | | VAEIRG | |
| PUF R7 | G | NVLVLSQHKFASNVV | 509 |
| | | EKCVTHASRTERAVL | |
| | | IDEVCTMNDGPHS | |
| PUF R8 | U | ALYTMMKDQYANYVV | 493 |
| | | QKMIDVAEPGQRKIV | |
| | | MHKIRP | |
| PUF R8′ | — | HIATLRKYTYGKHIL | 496 |
| | | AKLEKYYMKNGVDLG | |

[0625] An exemplary 15-mer RNA recognition (15PUF) targeting

(SEQ ID NO: 455)
UGCUGCUGCUGCUGC

comprises the amino acid sequence:

(SEQ ID NO: 447)
GRSRLLEDFRNNRYPNLQLREIAGHIMEFSQDQHGSRFIR
LKLERATPAERQLVFNEILQAAYQLMVDVFGSYVIEKFFE
FGSLEQKLALAERIRGHVLSLALQMYGNRVIQKALEFIPS
DQQNEMVRELDGHVLKCVKDQNGSYVVRKCIECVQPQSLQ
FIIDAFKGQVFALSTHPYGSRVIERILEHCLPDQTLPILE
ELHQHIMEFSQDQHGNRFIQLKLERATPAERQLVFNEILQ
AAYQLMVDVFGSYVIRKFFEFGSLEQKLALAERIRGHVLS
LALQMYGSRVIEKALEFIPSDQQNEMVRELDGHVLKCVKD
QNGNHVVQKCIECVQPQSLQFIIDAFKGQVFALSTHPYGS
RVIRRILEHCLPDQTLPILEELHQHTEQLVQDQYGSYVIE
HVLEHGRPEDKSKIVAEIRGNVLVLSQHKFANNVVQKCVT
HASRTERAVLIDEVCTMNDGPHSHTEQLVQDQYGSYVIRH
VLEHGRPEDKSKIVAEIRGNVLVLSQHKFASNVVEKCVTH
ASRTERAVLIDEVCTMNDGPHSALYTMMKDQYANYVVQK
MIDVAEPGQRKIVMHKIRPHIATLRKYTYGKHILAKLEKY
YMKNGVDLG.

In some aspects, SEQ ID NO: 447 comprises an architecture proceeding from the N-terminus to the C-terminus according to: R1′-R1-R2-R3-R4-R5-R1-R2-R3-R4-R5-R6-R7-R6-R7-R8-R8′. In some aspects, SEQ ID NO: 447 is comprised of the sequences detailed in Table 18.

TABLE 18
15PUF protein according to SEQ ID NO: 447

| | | | SEQ |
|---|---|---|---|
| PUF | RNA | Amino Acid | ID |
| Module | Recognition | Sequence | NO |
| PUF R1′ | — | GRSRLLEDFRNNRYP | 495 |
| | | NLQLREIAG | |
| PUF R1 | C | HIMEFSQDQHGSRFI | 498 |
| | | RLKLERATPAERQLV | |
| | | FNEILQ | |
| PUF R2 | G | AAYQLMVDVFGSYVI | 491 |
| | | EKFFEFGSLEQKLAL | |
| | | AERIRG | |
| PUF R3 | U | HVLSLALQMYGNRVI | 505 |
| | | QKALEFIPSDQQNEM | |
| | | VRELDG | |
| PUF R4 | C | HVLKCVKDQNGSYVV | 504 |
| | | RKCIECVQPQSLQFI | |
| | | IDAFKG | |
| PUF R5 | G | QVFALSTHPYGSRVI | 512 |
| | | ERILEHCLPDQTLPI | |
| | | LEELHQ | |
| PUF R1 | U | HIMEFSQDQHGNRFI | 497 |
| | | QLKLERATPAERQLV | |
| | | FNEILQ | |
| PUF R2 | C | AAYQLMVDVFGSYVI | 492 |
| | | RKFFEFGSLEQKLAL | |
| | | AERIRG | |
| PUF R3 | G | HVLSLALQMYGSRVI | 506 |
| | | EKALEFIPSDQQNEM | |
| | | VRELDG | |
| PUF R4 | U | HVLKCVKDQNGNHVV | 502 |
| | | QKCIECVQPQSLQFI | |
| | | IDAFKG | |
| PUF R5 | C | QVFALSTHPYGSRVI | 513 |
| | | RRILEHCLPDQTLPI | |
| | | LEELHQ | |
| PUF R6 | G | HTEQLVQDQYGSYVI | 500 |
| | | EHVLEHGRPEDKSKI | |
| | | VAEIRG | |
| PUF R7 | U | NVLVLSQHKFANNVV | 508 |
| | | QKCVTHASRTERAVL | |
| | | IDEVCTMNDGPHS | |
| PUF R6 | C | HTEQLVQDQYGSYVI | 501 |
| | | RHVLEHGRPEDKSKI | |
| | | VAEIRG | |
| PUF R7 | G | NVLVLSQHKFASNVV | 509 |
| | | EKCVTHASRTERAVL | |
| | | IDEVCTMNDGPHS | |
| PUF R8 | U | ALYTMMKDQYANYVV | 493 |
| | | QKMIDVAEPGQRKIV | |
| | | MHKIRP | |
| PUF R8′ | — | HIATLRKYTYGKHIL | 496 |
| | | AKLEKYYMKNGVDLG | |

[0626] An exemplary 15-mer RNA recognition (15PUF) targeting

(SEQ ID NO: 455)
UGCUGCUGCUGCUGC

comprises tile amino acid sequence:

(SEQ ID NO: 448)
GRSRLLEDFRNNRYPNLQLREIAGHIMEFSQDQHGSRFIRL
KLERATPAERQLVFNEILQAAYQLMVDVFGSYVIEKFFEF
GSLEQKLALAERIRGHVLSLALQMYGNRVIQKALEFIPSD
QQNEMVRELDGHVLKCVKDQNGSYVVRKCIECVQPQSLQF
IIDAFKGQVFALSTHPYGSRVIERILEHCLPDQTLPILEE
LHQHTEQLVQDQYGNYVIQHVLEHGRPEDKSKIVAEIRGH
IMEFSQDQHGSRFIRLKLERATPAERQLVFNEILQAAYQL
MVDVFGSYVIEKFFEFGSLEQKLALAERIRGHVLSLALQM
YGNRVIQKALEFIPSDQQNEMVRELDGHVLKCVKDQNGSY
VVRKCIECVQPQSLQFIIDAFKGQVFALSTHPYGSRVIER
ILEHCLPDQTLPILEELHQHTEQLVQDQYGNYVIQHVLEH
GRPEDKSKIVAEIRGNVLVLSQHKFASYVVRKCVTHASRT
ERAVLIDEVCTMNDGPHSNVLVLSQHKFASNVVEKCVTHA
SRTERAVLIDEVCTMNDGPHSALYTMMKDQYANYVVQKMI
DVAEPGQRKIVMHKIRPHIATLRKYTYGKHILAKLEKYYM
KNGVDLG.

In some aspects, SEQ ID NO: 448 comprises an architecture proceeding from the N-terminus to the C-terminus according to: R1′-R1-R2-R3-R4-R5-R6-R1-R2-R3-R4-R5-R6-R7-R7-R8-R8′. In some aspects, SEQ ID NO: 448 is comprised of the sequences detailed in Table 19.

TABLE 19
15PUF protein according to SEQ ID NO: 448

| | | | SEQ |
|---|---|---|---|
| PUF | RNA | Amino Acid | ID |
| Module | Recognition | Sequence | NO |
| PUF R1′ | — | GRSRLLEDFRNNRYP | 495 |
| | | NLQLREIAG | |
| PUF R1 | C | HIMEFSQDQHGSRFI | 498 |
| | | RLKLERATPAERQLV | |
| | | FNEILQ | |
| PUF R2 | G | AAYQLMVDVFGSYVI | 491 |
| | | EKFFEFGSLEQKLAL | |
| | | AERIRG | |
| PUF R3 | U | HVLSLALQMYGNRVI | 505 |
| | | QKALEFIPSDQQNEM | |
| | | VRELDG | |
| PUF R4 | C | HVLKCVKDQNGSYVV | 504 |
| | | RKCIECVQPQSLQFI | |
| | | IDAFKG | |
| PUF R5 | G | QVFALSTHPYGSRV | 512 |
| | | IERILEHCLPDQTLP | |
| | | ILEELHQ | |
| PUF R6 | U | HTEQLVQDQYGNYVI | 499 |
| | | QHVLEHGRPEDKSKI | |
| | | VAEIRG | |
| PUF R1 | C | HIMEFSQDQHGSRFI | 498 |
| | | RLKLERATPAERQLV | |
| | | FNEILQ | |
| PUF R2 | G | AAYQLMVDVFGSYVI | 491 |
| | | EKFFEFGSLEQKLAL | |
| | | AERIRG | |
| PUF R3 | U | HVLSLALQMYGNRVI | 505 |
| | | QKALEFIPSDQQNE | |
| | | MVRELDG | |
| PUF R4 | C | HVLKCVKDQNGSYVV | 504 |
| | | RKCIECVQPQSLQFI | |
| | | IDAFKG | |
| PUF R5 | G | QVFALSTHPYGSRVI | 512 |
| | | ERILEHCLPDQTLP | |
| | | ILEELHQ | |
| PUF R6 | U | HTEQLVQDQYGNYVI | 499 |
| | | QHVLEHGRPEDKSKI | |
| | | VAEIRG | |
| PUF R7 | C | NVLVLSQHKFASYVV | 510 |
| | | RKCVTHASRTERAVL | |
| | | IDEVCTMNDGPHS | |
| PUF R7 | G | NVLVLSQHKFASNVV | 509 |
| | | EKCVTHASRTERAVL | |
| | | IDEVCTMNDGPHS | |
| PUF R8 | U | ALYTMMKDQYANYVV | 493 |
| | | QKMIDVAEPGQRKIV | |
| | | MHKIRP | |
| PUF R8′ | — | HIATLRKYTYGKHIL | 496 |
| | | AKLEKYYMKNGVDLG | |

[0627] An exemplary 15-mer RNA recognition (15PUF) targeting

(SEQ ID NO: 455)
UGCUGCUGCUGCUGC

comprises the amino acid sequence:

(SEQ ID NO: 461)
GRSRLLEDFRNNRYPNLQLREIAGHIMEFSQDQHGSRFIRLKLERATPA
ERQLVFNEILQAAYQLMVDVFGSYVIEKFFEFGSLEQKLALAERIRGHV
LSLALQMYGNRVIQKALEFIPSDQQNEMVRELDGHVLKCVKDQNGSYVV
RKCIECVQPQSLQFIIDAFKGQVFALSTHPYGSRVIERILEHCLPDQTL
PILEELHQHTEQLVQDQYGNYVIQHVLEHGRPEDKSKIVAEIRGNVLVL
SQHKFASYVVRKCVTHASRTERAVLIDEVCTMNDGPHSHIMEFSQDQHG
SRFIELKLERATPAERQLVFNEILQAAYQLMVDVFGNYVIQKFFEFGSL
EQKLALAERIRGHVLSLALQMYGSYVIRKALEFIPSDQQNEMVRELDGH
VLKCVKDQNGSYVVEKCIECVQPQSLQFIIDAFKGQVFALSTHPYGNRV
IQRILEHCLPDQTLPILEELHQHTEQLVQDQYGSYVIRHVLEHGRPEDK
SKIVAEIRGNVLVLSQHKFASNVVEKCVTHASRTERAVLIDEVCTMNDG
PHSALYTMMKDQYANYVVQKMIDVAEPGQRKIVMHKIRPHIATLRKYTY
GKHILAKLEKYYMKNGVDLG.

In some aspects, SEQ ID NO: 461 comprises an architecture proceeding from the N-terminus to the C-terminus according to: R1′-R1-R2-R3-R4-R5-R6-R7-R1-R2-R3-R4-R5-R6-R7-R8-R8′. In some aspects, SEQ ID NO: 461 is comprised of the sequences detailed in Table 20.

TABLE 20
15PUF protein according to SEQ ID NO: 461

| PUF | RNA | | SEQ |
|---|---|---|---|
| Module | Recognition | Amino Acid Sequence | ID NO |
| PUF R1′ | — | GRSRLLEDFRNNRYPNLQLREIAG | 495 |
| PUF R1 | C | HIMEFSQDQHGSRFIRLKLERATPAERQLVFNEILQ | 498 |
| PUF R2 | G | AAYQLMVDVFGSYVIEKFFEFGSLEQKLALAERIRG | 491 |
| PUF R3 | U | HVLSLALQMYGNRVIQKALEFIPSDQQNEMVRELDG | 505 |
| PUF R4 | C | HVLKCVKDQNGSYVVRKCIECVQPQSLQFIIDAFKG | 504 |
| PUF R5 | G | QVFALSTHPYGSRVIERILEHCLPDQTLPILEELHQ | 512 |
| PUF R6 | U | HTEQLVQDQYGNYVIQHVLEHGRPEDKSKIVAEIRG | 499 |
| PUF R7 | C | NVLVLSQHKFASYVVRKCVTHASRTERAVLIDEVCTMND | 510 |
| | | GPHS | |
| PUF R1 | G | HIMEFSQDQHGSRFIELKLERATPAERQLVFNEILQ | 498 |
| PUF R2 | U | AAYQLMVDVFGNYVIQKFFEFGSLEQKLALAERIRG | 490 |
| PUF R3 | C | HVLSLALQMYGSYVIRKALEFIPSDQQNEMVRELDG | 507 |
| PUF R4 | G | HVLKCVKDQNGSYVVEKCIECVQPQSLQFIIDAFKG | 503 |
| PUF R5 | U | QVFALSTHPYGNRVIQRILEHCLPDQTLPILEELHQ | 511 |
| PUF R6 | C | HTEQLVQDQYGSYVIRHVLEHGRPEDKSKIVAEIRG | 501 |
| PUF R7 | G | NVLVLSQHKFASNVVEKCVTHASRTERAVLIDEVCTMND | 509 |
| | | GPHS | |
| PUF R8 | U | ALYTMMKDQYANYVVQKMIDVAEPGQRKIVMHKIRP | 493 |
| PUF R8′ | | HIATLRKYTYGKHILAKLEKYYMKNGVDLG | 496 |

[0628] An exemplary 16-mer RNA recognition (16PUF) targeting

(SEQ ID NO: 456)
UGCUGCUGCUGCUGCU

comprises the amino acid sequence:

(SEQ ID NO: 449)
GRSRLLEDFRNNRYPNLQLREIAGHIMEFSQDQHGNRFIQLKLERATPA
ERQLVFNEILQAAYQLMVDVFGSYVIRKFFEFGSLEQKLALAERIRGHV
LSLALQMYGSRVIEKALEFIPSDQQNEMVRELDGHVLKCVKDQNGNHVV
QKCIECVQPQSLQFIIDAFKGQVFALSTHPYGSRVIRRILEHCLPDQTL
PILEELHQHIMEFSQDQHGSRFIELKLERATPAERQLVFNEILQAAYQL
MVDVFGNYVIQKFFEFGSLEQKLALAERIRGHVLSLALQMYGSYVIRKA
LEFIPSDQQNEMVRELDGHVLKCVKDQNGSYVVEKCIECVQPQSLQFII
DAFKGQVFALSTHPYGNRVIQRILEHCLPDQTLPILEELHQHTEQLVQD
QYGSYVIRHVLEHGRPEDKSKIVAEIRGNVLVLSQHKFASNVVEKCVTH
ASRTERAVLIDEVCTMNDGPHSALYTMMKDQYANYVVQKMIDVAEPGQR
KIVMHKIRPHTEQLVQDQYGSYVIRHVLEHGRPEDKSKIVAEIRGNVLV
LSQHKFASNVVEKCVTHASRTERAVLIDEVCTMNDGPHSALYTMMKDQY
ANYVVQKMIDVAEPGQRKIVMHKIRPHIATLRKYTYGKHILAKLEKYYM
KNGVDLG.

In some aspects, SEQ ID NO: 449 comprises an architecture proceeding from the N-terminus to the C-terminus according to: R1′-R1-R2-R3-R4-R5-R1-R2-R3-R4-R5-R6-R7-R8-R6-R7-R8-R8′. In some aspects, SEQ ID NO: 449 is comprised of the sequences detailed in Table 21.

TABLE 21
16PUF protein according to SEQ ID NO: 449

| PUF | RNA | | SEQ |
|---|---|---|---|
| Module | Recognition | Amino Acid Sequence | ID NO |
| PUF R1′ | | GRSRLLEDFRNNRYPNLQLREIAG | 495 |
| PUF R1 | U | HIMEFSQDQHGNRFIQLKLERATPAERQLVFNEILQ | 497 |
| PUF R2 | C | AAYQLMVDVFGSYVIRKFFEFGSLEQKLALAERIRG | 492 |
| PUF R3 | G | HVLSLALQMYGSRVIEKALEFIPSDQQNEMVRELDG | 506 |
| PUF R4 | U | HVLKCVKDQNGNHVVQKCIECVQPQSLQFIIDAFKG | 502 |
| PUF R5 | C | QVFALSTHPYGSRVIRRILEHCLPDQTLPILEELHQ | 513 |
| PUF R1 | G | HIMEFSQDQHGSRFIELKLERATPAERQLVFNEILQ | 498 |
| PUF R2 | U | AAYQLMVDVFGNYVIQKFFEFGSLEQKLALAERIRG | 490 |
| PUF R3 | C | HVLSLALQMYGSYVIRKALEFIPSDQQNEMVRELDG | 507 |
| PUF R4 | G | HVLKCVKDQNGSYVVEKCIECVQPQSLQFIIDAFKG | 503 |
| PUF R5 | U | QVFALSTHPYGNRVIQRILEHCLPDQTLPILEELHQ | 511 |
| PUF R6 | C | HTEQLVQDQYGSYVIRHVLEHGRPEDKSKIVAEIRG | 501 |
| PUF R7 | G | NVLVLSQHKFASNVVEKCVTHASRTERAVLIDEVCTMN | 509 |
| | | DGPHS | |
| PUF R8 | U | ALYTMMKDQYANYVVQKMIDVAEPGQRKIVMHKIRP | 493 |
| PUF R6 | C | HTEQLVQDQYGSYVIRHVLEHGRPEDKSKIVAEIRG | 501 |
| PUF R7 | G | NVLVLSQHKFASNVVEKCVTHASRTERAVLIDEVCTMN | 509 |
| | | DGPHS | |
| PUF R8 | U | ALYTMMKDQYANYVVQKMIDVAEPGQRKIVMHKIRP | 493 |
| PUF R8′ | | HIATLRKYTYGKHILAKLEKYYMKNGVDLG | 496 |

[0629] An exemplary 16-mer RNA recognition (16PUF)

(SEQ ID NO: 456)
UGCUGCUGCUGCUGCU

comprises the amino acid sequence:

(SEQ ID NO: 450)
GRSRLLEDFRNNRYPNLQLREIAGHIMEFSQDQHGNRFIQLKLERATPA
ERQLVFNEILQAAYQLMVDVFGSYVIRKFFEFGSLEQKLALAERIRGHV
LSLALQMYGSRVIEKALEFIPSDQQNEMVRELDGHVLKCVKDQNGNHVV
QKCIECVQPQSLQFIIDAFKGQVFALSTHPYGSRVIRRILEHCLPDQTL
PILEELHQHTEQLVQDQYGSYVIEHVLEHGRPEDKSKIVAEIRGHIMEF
SQDQHGNRFIQLKLERATPAERQLVFNEILQAAYQLMVDVFGSYVIRKF
FEFGSLEQKLALAERIRGHVLSLALQMYGSRVIEKALEFIPSDQQNEMV
RELDGHVLKCVKDQNGNHVVQKCIECVQPQSLQFIIDAFKGQVFALSTH
PYGSRVIRRILEHCLPDQTLPILEELHQHTEQLVQDQYGSYVIEHVLEH
GRPEDKSKIVAEIRGNVLVLSQHKFANNVVQKCVTHASRTERAVLIDEV
CTMNDGPHSALYTMMKDQYASYVVRKMIDVAEPGQRKIVMHKIRPNVLV
LSQHKFASNVVEKCVTHASRTERAVLIDEVCTMNDGPHSALYTMMKDQY
ANYVVQKMIDVAEPGQRKIVMHKIRPHIATLRKYTYGKHILAKLEKYYM
KNGVDLG.

In some aspects, SEQ ID NO: 450 comprises an architecture proceeding from the N-terminus to the C-terminus according to: R1′-R1-R2-R3-R4-R5-R6-R1-R2-R3-R4-R5-R6-R7-R8-R7-R8-R8′. In some aspects, SEQ ID NO: 450 is comprised of the sequences detailed in Table 22.

TABLE 22
16PUF protein according to SEQ ID NO: 450

| PUF | RNA | | SEQ |
|---|---|---|---|
| Module | Recognition | Amino Acid Sequence | ID NO |
| PUF R1′ | | GRSRLLEDFRNNRYPNLQLREIAG | 495 |
| PUF R1 | U | HIMEFSQDQHGNRFIQLKLERATPAERQLVFNEILQ | 497 |
| PUF R2 | C | AAYQLMVDVFGSYVIRKFFEFGSLEQKLALAERIRG | 492 |
| PUF R3 | G | HVLSLALQMYGSRVIEKALEFIPSDQQNEMVRELDG | 506 |
| PUF R4 | U | HVLKCVKDQNGNHVVQKCIECVQPQSLQFIIDAFKG | 502 |
| PUF R5 | C | QVFALSTHPYGSRVIRRILEHCLPDQTLPILEELHQ | 513 |
| PUF R6 | G | HTEQLVQDQYGSYVIEHVLEHGRPEDKSKIVAEIRG | 500 |
| PUF R1 | U | HIMEFSQDQHGNRFIQLKLERATPAERQLVFNEILQ | 497 |
| PUF R2 | C | AAYQLMVDVFGSYVIRKFFEFGSLEQKLALAERIRG | 492 |
| PUF R3 | G | HVLSLALQMYGSRVIEKALEFIPSDQQNEMVRELDG | 506 |
| PUF R4 | U | HVLKCVKDQNGNHVVQKCIECVQPQSLQFIIDAFKG | 502 |
| PUF R5 | C | QVFALSTHPYGSRVIRRILEHCLPDQTLPILEELHQ | 513 |
| PUF R6 | G | HTEQLVQDQYGSYVIEHVLEHGRPEDKSKIVAEIRG | 500 |
| PUF R7 | U | NVLVLSQHKFANNVVQKCVTHASRTERAVLIDEVCTM | 508 |
| | | NDGPHS | |
| PUF R8 | C | ALYTMMKDQYASYVVRKMIDVAEPGQRKIVMHKIRP | 494 |
| PUF R7 | G | NVLVLSQHKFASNVVEKCVTHASRTERAVLIDEVCTMN | 509 |
| | | DGPHS | |
| PUF R8 | U | ALYTMMKDQYANYVVQKMIDVAEPGQRKIVMHKIRP | 493 |
| PUF R8′ | | HIATLRKYTYGKHILAKLEKYYMKNGVDLG | 496 |

[0630] An exemplary 16-mer RNA recognition (16PUF) targeting

(SEQ ID NO: 456)
UGCUGCUGCUGCUGCU

comprises the amino acid sequence:

(SEQ ID NO: 451)
GRSRLLEDFRNNRYPNLQLREIAGHIMEFSQDQHGNRFIQLKLERATPA
ERQLVFNEILQAAYQLMVDVFGSYVIRKFFEFGSLEQKLALAERIRGHV
LSLALQMYGSRVIEKALEFIPSDQQNEMVRELDGHVLKCVKDQNGNHVV
QKCIECVQPQSLQFIIDAFKGQVFALSTHPYGSRVIRRILEHCLPDQTL
PILEELHQHTEQLVQDQYGSYVIEHVLEHGRPEDKSKIVAEIRGNVLVL
SQHKFANNVVQKCVTHASRTERAVLIDEVCTMNDGPHSALYTMMKDQYA
SYVVRKMIDVAEPGQRKIVMHKIRPHIMEFSQDQHGSRFIELKLERATP
AERQLVFNEILQAAYQLMVDVFGNYVIQKFFEFGSLEQKLALAERIRGH
VLSLALQMYGSYVIRKALEFIPSDQQNEMVRELDGHVLKCVKDQNGSYV
VEKCIECVQPQSLQFIIDAFKGQVFALSTHPYGNRVIQRILEHCLPDQT
LPILEELHQHTEQLVQDQYGSYVIRHVLEHGRPEDKSKIVAEIRGNVLV
LSQHKFASNVVEKCVTHASRTERAVLIDEVCTMNDGPHSALYTMMKDQY
ANYVVQKMIDVAEPGQRKIVMHKIRPHIATLRKYTYGKHILAKLEKYYM
KNGVDLG.

In some aspects, SEQ ID NO: 451 comprises an architecture proceeding from the N-terminus to the C-terminus according to: R1′-R1-R2-R3-R4-R5-R6-R7-R8-R1-R2-R3-R4-R5-R6-R7-R8-R8′. In some aspects, SEQ ID NO: 451 is comprised of the sequences detailed in Table 23.

TABLE 23
16PUF protein according to SEQ ID NO: 451

| PUF | RNA | | SEQ |
|---|---|---|---|
| Module | Recognition | Amino Acid Sequence | ID NO |
| PUF R1′ | | GRSRLLEDFRNNRYPNLQLREIAG | 495 |
| PUF R1 | U | HIMEFSQDQHGNRFIQLKLERATPAERQLVFNEILQ | 497 |
| PUF R2 | C | AAYQLMVDVFGSYVIRKFFEFGSLEQKLALAERIRG | 492 |
| PUF R3 | G | HVLSLALQMYGSRVIEKALEFIPSDQQNEMVRELDG | 506 |
| PUF R4 | U | HVLKCVKDQNGNHVVQKCIECVQPQSLQFIIDAFKG | 502 |
| PUF R5 | C | QVFALSTHPYGSRVIRRILEHCLPDQTLPILEELHQ | 513 |
| PUF R6 | G | HTEQLVQDQYGSYVIEHVLEHGRPEDKSKIVAEIRG | 500 |
| PUF R7 | U | NVLVLSQHKFANNVVQKCVTHASRTERAVLIDEVCTM | 508 |
| | | NDGPHS | |
| PUF R8 | C | ALYTMMKDQYASYVVRKMIDVAEPGQRKIVMHKIRP | 494 |
| PUF R1 | G | HIMEFSQDQHGSRFIELKLERATPAERQLVFNEILQ | 498 |
| PUF R2 | U | AAYQLMVDVFGNYVIQKFFEFGSLEQKLALAERIRG | 490 |
| PUF R3 | C | HVLSLALQMYGSYVIRKALEFIPSDQQNEMVRELDG | 507 |
| PUF R4 | G | HVLKCVKDQNGSYVVEKCIECVQPQSLQFIIDAFKG | 503 |
| PUF R5 | U | QVFALSTHPYGNRVIQRILEHCLPDQTLPILEELHQ | 511 |
| PUF R6 | C | HTEQLVQDQYGSYVIRHVLEHGRPEDKSKIVAEIRG | 501 |
| PUF R7 | G | NVLVLSQHKFASNVVEKCVTHASRTERAVLIDEVCTMN | 509 |
| | | DGPHS | |
| PUF R8 | U | ALYTMMKDQYANYVVQKMIDVAEPGQRKIVMHKIRP | 493 |
| PUF R8′ | — | HIATLRKYTYGKHILAKLEKYYMKNGVDLG | 496 |

[0631] An exemplary 8-mer RNA recognition (8PUF) targeting

(SEQ ID NO: 472)
CUGCUGCU

comprises the amino acid sequence:

(SEQ ID NO: 480)
GRSRLLEDFRNNRYPNLQLREIAGHIMEFSQDQHGNRFIQLKLERATPA
ERQLVFNEILQAAYQLMVDVFGSYVIRKFFEFGSLEQKLALAERIRGHV
LSLALQMYGSRVIEKALEFIPSDQQNEMVRELDGHVLKCVKDQNGNHVV
QKCIECVQPQSLQFIIDAFKGQVFALSTHPYGSRVIRRILEHCLPDQTL
PILEELHQHTEQLVQDQYGSYVIEHVLEHGRPEDKSKIVAEIRGNVLVL
SQHKFANNVVQKCVTHASRTERAVLIDEVCTMNDGPHSALYTMMKDQYA
SYVVRKMIDVAEPGQRKIVMHKIRPHIATLRKYTYGKHILAKLEKYYMK
NGVDLG.

In some aspects SEQ ID NO: 480 comprises an architecture proceeding from the N-terminus to the C-terminus according to: R1′-R1-R2-R3-R4-R5-R6-R7-R8-R8′. In some aspects, SEQ ID NO: 480 is comprised of the sequences detailed in Table 24.

TABLE 24
8PUF protein according to SEQ ID NO: 480

| PUF | RNA | | SEQ |
|---|---|---|---|
| Module | Recognition | Amino Acid Sequence | ID NO |
| PUF R1′ | | GRSRLLEDFRNNRYPNLQLREIAG | 495 |
| PUF R1 | U | HIMEFSQDQHGNRFIQLKLERATPAERQLVFNEILQ | 497 |
| PUF R2 | C | AAYQLMVDVFGSYVIRKFFEFGSLEQKLALAERIRG | 492 |
| PUF R3 | G | HVLSLALQMYGSRVIEKALEFIPSDQQNEMVRELDG | 507 |
| PUF R4 | U | HVLKCVKDQNGNHVVQKCIECVQPQSLQFIIDAFKG | 503 |
| PUF R5 | C | QVFALSTHPYGSRVIRRILEHCLPDQTLPILEELHQ | 514 |
| PUF R6 | G | HTEQLVQDQYGSYVIEHVLEHGRPEDKSKIVAEIRG | 501 |
| PUF R7 | U | NVLVLSQHKFANNVVQKCVTHASRTERAVLIDEVCTMND | 509 |
| | | GPHS | |
| PUF R8 | C | ALYTMMKDQYASYVVRKMIDVAEPGQRKIVMHKIRP | 494 |
| PUF R8′ | | HIATLRKYTYGKHILAKLEKYYMKNGVDLG | 496 |

[0632] An exemplary 14-mer RNA recognition (14PUF) targeting

(SEQ ID NO: 473)
CUGCUGCUGCUGCU

comprises the amino acid sequence:

(SEQ ID NO: 481)
GRSRLLEDFRNNRYPNLQLREIAGHIMEFSQDQHGNRFIQLKLERATPA
ERQLVFNEILQAAYQLMVDVFGSYVIRKFFEFGSLEQKLALAERIRGHV
LSLALQMYGSRVIEKALEFIPSDQQNEMVRELDGHVLKCVKDQNGNHVV
QKCIECVQPQSLQFIIDAFKGQVFALSTHPYGSRVIRRILEHCLPDQTL
PILEELHQHIMEFSQDQHGSRFIELKLERATPAERQLVFNEILQAAYQL
MVDVFGNYVIQKFFEFGSLEQKLALAERIRGHVLSLALQMYGSYVIRKA
LEFIPSDQQNEMVRELDGHVLKCVKDQNGSYVVEKCIECVQPQSLQFII
DAFKGQVFALSTHPYGNRVIQRILEHCLPDQTLPILEELHQHTEQLVQD
QYGSYVIRHVLEHGRPEDKSKIVAEIRGHTEQLVQDQYGSYVIEHVLEH
GRPEDKSKIVAEIRGNVLVLSQHKFANNVVQKCVTHASRTERAVLIDEV
CTMNDGPHSALYTMMKDQYASYVVRKMIDVAEPGQRKIVMHKIRPHIAT
LRKYTYGKHILAKLEKYYMKNGVDLG.

In some aspects, SEQ ID NO: 481 comprises an architecture proceeding from the N-terminus to the C-terminus according to: R1′-R-2R-45-1R-3R-5R-6 R-2R-4R-1R-3R5R-6R7-R8-R8′. In some aspects, SEQ ID NO: 481 is comprised of the sequences detailed in Table 25.

TABLE 25
14PUF protein according to SEQ ID NO: 481

| PUF | RNA | | SEQ |
|---|---|---|---|
| Module | Recognition | Amino Acid Sequence | ID NO |
| PUF R1′ | — | GRSRLLEDFRNNRYPNLQLREIAG | 495 |
| PUF R1 | U | HIMEFSQDQHGNRFIQLKLERATPAERQLVFNEILQ | 497 |
| PUF R2 | C | AAYQLMVDVFGSYVIRKFFEFGSLEQKLALAERIRG | 492 |
| PUF R3 | G | HVLSLALQMYGSRVIEKALEFIPSDQQNEMVRELDG | 507 |
| PUF R4 | U | HVLKCVKDQNGNHVVQKCIECVQPQSLQFIIDAFKG | 503 |
| PUF R5 | C | QVFALSTHPYGSRVIRRILEHCLPDQTLPILEELHQ | 514 |
| PUF R1 | G | HIMEFSQDQHGSRFIELKLERATPAERQLVFNEILQ | 501 |
| PUF R2 | U | AAYQLMVDVFGNYVIQKFFEFGSLEQKLALAERIRG | 509 |
| PUF R3 | C | HVLSLALQMYGSYVIRKALEFIPSDQQNEMVRELDG | 508 |
| PUF R4 | G | HVLKCVKDQNGSYVVEKCIECVQPQSLQFIIDAFKG | 504 |
| PUF R5 | U | QVFALSTHPYGNRVIQRILEHCLPDQTLPILEELHQ | 512 |
| PUF R6 | C | HTEQLVQDQYGSYVIRHVLEHGRPEDKSKIVAEIRG | 502 |
| PUF R6 | G | HTEQLVQDQYGSYVIEHVLEHGRPEDKSKIVAEIRG | 501 |
| PUF R7 | U | NVLVLSQHKFANNVVQKCVTHASRTERAVLIDEVCTMND | 509 |
| | | GPHS | |
| PUF R8 | C | ALYTMMKDQYASYVVRKMIDVAEPGQRKIVMHKIRP | 494 |
| PUF R8′ | | HIATLRKYTYGKHILAKLEKYYMKNGVDLG | 496 |

[0633] An exemplary 14-mer RNA recognition (14PUF) targeting

(SEQ ID NO: 473)
CUGCUGCUGCUGCU

comprises the amino acid sequence:

(SEQ ID NO: 482)
GRSRLLEDFRNNRYPNLQLREIAGHIMEFSQDQHGNRFIQLKLERATPA
ERQLVFNEILQAAYQLMVDVFGSYVIRKFFEFGSLEQKLALAERIRGHV
LSLALQMYGSRVIEKALEFIPSDQQNEMVRELDGHVLKCVKDQNGNHVV
QKCIECVQPQSLQFIIDAFKGQVFALSTHPYGSRVIRRILEHCLPDQTL
PILEELHQHTEQLVQDQYGSYVIEHVLEHGRPEDKSKIVAEIRGHIMEF
SQDQHGNRFIQLKLERATPAERQLVFNEILQAAYQLMVDVFGSYVIRKF
FEFGSLEQKLALAERIRGHVLSLALQMYGSRVIEKALEFIPSDQQNEMV
RELDGHVLKCVKDQNGNHVVQKCIECVQPQSLQFIIDAFKGQVFALSTH
PYGSRVIRRILEHCLPDQTLPILEELHQHTEQLVQDQYGSYVIEHVLEH
GRPEDKSKIVAEIRGNVLVLSQHKFANNVVQKCVTHASRTERAVLIDEV
CTMNDGPHSALYTMMKDQYASYVVRKMIDVAEPGQRKIVMHKIRPHIAT
LRKYTYGKHILAKLEKYYMKNGVDLG.

In some aspects, SEQ ID NO: 482 comprises an architecture proceeding from the N-terminus to the C-terminus according to: R1′-R1-R2-R3-R4-R5-R6-R1-R2-R3-R4-R5-R6-R7-R8-R8′. In some aspects, SEQ ID NO: 482 is comprised of the sequences detailed in Table 26.

TABLE 26
14PUF protein according to SEQ ID NO: 482

| PUF | RNA | | SEQ |
|---|---|---|---|
| Module | Recognition | Amino Acid Sequence | ID NO |
| PUF R1′ | — | GRSRLLEDFRNNRYPNLQLREIAG | 495 |
| PUF R1 | U | HIMEFSQDQHGNRFIQLKLERATPAERQLVFNEILQ | 497 |
| PUF R2 | C | AAYQLMVDVFGSYVIRKFFEFGSLEQKLALAERIRG | 492 |
| PUF R3 | G | HVLSLALQMYGSRVIEKALEFIPSDQQNEMVRELDG | 507 |
| PUF R4 | U | HVLKCVKDQNGNHVVQKCIECVQPQSLQFIIDAFKG | 503 |
| PUF R5 | C | QVFALSTHPYGSRVIRRILEHCLPDQTLPILEELHQ | 514 |
| PUF R6 | G | HTEQLVQDQYGSYVIEHVLEHGRPEDKSKIVAEIRG | 501 |
| PUF RI | U | HIMEFSQDQHGNRFIQLKLERATPAERQLVFNEILQ | 497 |
| PUF R2 | C | AAYQLMVDVFGSYVIRKFFEFGSLEQKLALAERIRG | 492 |
| PUF R3 | G | HVLSLALQMYGSRVIEKALEFIPSDQQNEMVRELDG | 507 |
| PUF R4 | U | HVLKCVKDQNGNHVVQKCIECVQPQSLQFIIDAFKG | 503 |
| PUF R5 | C | QVFALSTHPYGSRVIRRILEHCLPDQTLPILEELHQ | 514 |
| PUF R6 | G | HTEQLVQDQYGSYVIEHVLEHGRPEDKSKIVAEIRG | 501 |
| PUF R7 | U | NVLVLSQHKFANNVVQKCVTHASRTERAVLIDEVCTMND | 509 |
| | | GPHS | |
| PUF R8 | C | ALYTMMKDQYASYVVRKMIDVAEPGQRKIVMHKIRP | 494 |
| PUF R8′ | — | HIATLRKYTYGKHILAKLEKYYMKNGVDLG | 496 |

[0634] An exemplary 15-mer RNA recognition (15PUF) targeting

(SEQ ID NO: 474)
CUGCUGCUGCUGCUG

comprises the amino acid sequence:

(SEQ ID NO: 483)
GRSRLLEDFRNNRYPNLQLREIAGHIMEFSQDQHGSRFIELKLERATPA
ERQLVFNEILQAAYQLMVDVFGNYVIQKFFEFGSLEQKLALAERIRGHV
LSLALQMYGSYVIRKALEFIPSDQQNEMVRELDGHVLKCVKDQNGSYVV
EKCIECVQPQSLQFIIDAFKGQVFALSTHPYGNRVIQRILEHCLPDQTL
PILEELHQHIMEFSQDQHGSRFIRLKLERATPAERQLVFNEILQAAYQL
MVDVFGSYVIEKFFEFGSLEQKLALAERIRGHVLSLALQMYGNRVIQKA
LEFIPSDQQNEMVRELDGHVLKCVKDQNGSYVVRKCIECVQPQSLQFII
DAFKGQVFALSTHPYGSRVIERILEHCLPDQTLPILEELHQHTEQLVQD
QYGNYVIQHVLEHGRPEDKSKIVAEIRGNVLVLSQHKFASYVVRKCVTH
ASRTERAVLIDEVCTMNDGPHSHTEQLVQDQYGSYVIEHVLEHGRPEDK
SKIVAEIRGNVLVLSQHKFANNVVQKCVTHASRTERAVLIDEVCTMNDG
PHSALYTMMKDQYASYVVRKMIDVAEPGQRKIVMHKIRPHIATLRKYTY
GKHILAKLEKYYMKNGVDLG

In some aspects, SEQ ID NO: 483 comprises an architecture proceeding from the N-terminus to the C-terminus according to: R1′-R1-R2-R3-R4-R5-R1-R2-R3-R4-R5-R6-R7-R6-R7-R8-R8′. In some aspects, SEQ ID NO: 483 is comprised of the sequences detailed in Table 27.

TABLE 27
15PUF protein according to SEQ ID NO: 483

| PUF | RNA | | SEQ |
|---|---|---|---|
| Module | Recognition | Amino Acid Sequence | ID NO |
| PUF R1′ | — | GRSRLLEDFRNNRYPNLQLREIAG | 495 |
| R1 | G | HIMEFSQDQHGSRFIELKLERATPAERQLVFNEILQ | 498 |
| R2 | U | AAYQLMVDVFGNYVIQKFFEFGSLEQKLALAERIRG | 490 |
| R3 | C | HVLSLALQMYGSYVIRKALEFIPSDQQNEMVRELDG | 508 |
| R4 | G | HVLKCVKDQNGSYVVEKCIECVQPQSLQFIIDAFKG | 504 |
| R5 | U | QVFALSTHPYGNRVIQRILEHCLPDQTLPILEELHQ | 512 |
| R1 | C | HIMEFSQDQHGSRFIRLKLERATPAERQLVFNEILQ | 499 |
| R2 | G | AAYQLMVDVFGSYVIEKFFEFGSLEQKLALAERIRG | 491 |
| R3 | U | HVLSLALQMYGNRVIQKALEFIPSDQQNEMVRELDG | 506 |
| R4 | C | HVLKCVKDQNGSYVVRKCIECVQPQSLQFIIDAFKG | 505 |
| R5 | G | QVFALSTHPYGSRVIERILEHCLPDQTLPILEELHQ | 513 |
| R6 | U | HTEQLVQDQYGNYVIQHVLEHGRPEDKSKIVAEIRG | 500 |
| R7 | C | NVLVLSQHKFASYVVRKCVTHASRTERAVLIDEVCTMNDG | 511 |
| | | PHS | |
| R6 | G | HTEQLVQDQYGSYVIEHVLEHGRPEDKSKIVAEIRG | 501 |
| R7 | U | NVLVLSQHKFANNVVQKCVTHASRTERAVLIDEVCTMND | 509 |
| | | GPHS | |
| R8 | C | ALYTMMKDQYASYVVRKMIDVAEPGQRKIVMHKIRP | 494 |
| PUF R8′ | — | HIATLRKYTYGKHILAKLEKYYMKNGVDLG | 496 |

[0635] An exemplary 15-mer RNA recognition (15PUF) targeting

(SEQ ID NO: 474)
CUGCUGCUGCUGCUG

comprises the amino acid sequence:

(SEQ ID NO: 484)
GRSRLLEDFRNNRYPNLQLREIAGHIMEFSQDQHGSRFIELKLERATPA
ERQLVFNEILQAAYQLMVDVFGNYVIQKFFEFGSLEQKLALAERIRGHV
LSLALQMYGSYVIRKALEFIPSDQQNEMVRELDGHVLKCVKDQNGSYVV
EKCIECVQPQSLQFIIDAFKGQVFALSTHPYGNRVIQRILEHCLPDQTL
PILEELHQHTEQLVQDQYGSYVIRHVLEHGRPEDKSKIVAEIRGHIMEF
SQDQHGSRFIELKLERATPAERQLVFNEILQAAYQLMVDVFGNYVIQKF
FEFGSLEQKLALAERIRGHVLSLALQMYGSYVIRKALEFIPSDQQNEMV
RELDGHVLKCVKDQNGSYVVEKCIECVQPQSLQFIIDAFKGQVFALSTH
PYGNRVIQRILEHCLPDQTLPILEELHQHTEQLVQDQYGSYVIRHVLEH
GRPEDKSKIVAEIRGNVLVLSQHKFASNVVEKCVTHASRTERAVLIDEV
CTMNDGPHSNVLVLSQHKFANNVVQKCVTHASRTERAVLIDEVCTMNDG
PHSALYTMMKDQYASYVVRKMIDVAEPGQRKIVMHKIRPHIATLRKYTY
GKHILAKLEKYYMKNGVDLG

In some aspects, SEQ ID NO: 484 comprises an architecture proceeding from the N-terminus to the C-terminus according to: R1′-R1-R2-R3-R4-R5-R6-R1-R2-R3-R4-R5-R6-R7-R7-R8-R8′. In some aspects, SEQ ID NO: 484 is comprised of the sequences detailed in Table 28.

TABLE 28
15PUF protein according to SEQ ID NO: 484

| PUF | RNA | | SEQ |
|---|---|---|---|
| Module | Recognition | Amino Acid Sequence | ID NO |
| PUF R1′ | — | GRSRLLEDFRNNRYPNLQLREIAG | 495 |
| R1 | G | HIMEFSQDQHGSRFIELKLERATPAERQLVFNEILQ | 498 |
| R2 | U | AAYQLMVDVFGNYVIQKFFEFGSLEQKLALAERIRG | 490 |
| R3 | C | HVLSLALQMYGSYVIRKALEFIPSDQQNEMVRELDG | 508 |
| R4 | G | HVLKCVKDQNGSYVVEKCIECVQPQSLQFIIDAFKG | 504 |
| R5 | U | QVFALSTHPYGNRVIQRILEHCLPDQTLPILEELHQ | 512 |
| R6 | C | HTEQLVQDQYGSYVIRHVLEHGRPEDKSKIVAEIRG | 502 |
| R1 | G | HIMEFSQDQHGSRFIELKLERATPAERQLVFNEILQ | 498 |
| R2 | U | AAYQLMVDVFGNYVIQKFFEFGSLEQKLALAERIRG | 490 |
| R3 | C | HVLSLALQMYGSYVIRKALEFIPSDQQNEMVRELDG | 508 |
| R4 | G | HVLKCVKDQNGSYVVEKCIECVQPQSLQFIIDAFKG | 504 |
| R5 | U | QVFALSTHPYGNRVIQRILEHCLPDQTLPILEELHQ | 512 |
| R6 | C | HTEQLVQDQYGSYVIRHVLEHGRPEDKSKIVAEIRG | 502 |
| R7 | G | NVLVLSQHKFASNVVEKCVTHASRTERAVLIDEVCTMNDG | 510 |
| | | PHS | |
| R7 | U | NVLVLSQHKFANNVVQKCVTHASRTERAVLIDEVCTMND | 509 |
| | | GPHS | |
| R8 | C | ALYTMMKDQYASYVVRKMIDVAEPGQRKIVMHKIRP | 494 |
| PUF R8′ | — | HIATLRKYTYGKHILAKLEKYYMKNGVDLG | 496 |

[0636] An exemplary 15-mer RNA recognition (15PUF) targeting

(SEQ ID NO: 474)
CUGCUGCUGCUGCUG

comprises the amino acid sequence:

(SEQ ID NO: 485)
GRSRLLEDFRNNRYPNLQLREIAGHIMEFSQDQHGSRFIELKLERATPA
ERQLVFNEILQAAYQLMVDVFGNYVIQKFFEFGSLEQKLALAERIRGHV
LSLALQMYGSYVIRKALEFIPSDQQNEMVRELDGHVLKCVKDQNGSYVV
EKCIECVQPQSLQFIIDAFKGQVFALSTHPYGNRVIQRILEHCLPDQTL
PILEELHQHTEQLVQDQYGSYVIRHVLEHGRPEDKSKIVAEIRGNVLVL
SQHKFASNVVEKCVTHASRTERAVLIDEVCTMNDGPHSHIMEFSQDQHG
NRFIQLKLERATPAERQLVFNEILQAAYQLMVDVFGSYVIRKFFEFGSL
EQKLALAERIRGHVLSLALQMYGSRVIEKALEFIPSDQQNEMVRELDGH
VLKCVKDQNGNHVVQKCIECVQPQSLQFIIDAFKGQVFALSTHPYGSRV
IRRILEHCLPDQTLPILEELHQHTEQLVQDQYGSYVIEHVLEHGRPEDK
SKIVAEIRGNVLVLSQHKFANNVVQKCVTHASRTERAVLIDEVCTMNDG
PHSALYTMMKDQYASYVVRKMIDVAEPGQRKIVMHKIRPHIATLRKYTY
GKHILAKLEKYYMKNGVDLG

In some aspects, SEQ ID NO: 485 comprises an architecture proceeding from the N-terminus to the C-terminus according to: R1′-R1-R2-R3-R4-R5-R6-R7-R1-R2-R3-R4-R5-R6-R7-R8-R8′. In some aspects, SEQ ID NO: 485 is comprised of the sequences detailed in Table 29.

TABLE 29
15PUF protein according to SEQ ID NO: 485

| PUF | RNA | | SEQ |
|---|---|---|---|
| Module | Recognition | Amino Acid Sequence | ID NO |
| PUF R1′ | — | GRSRLLEDFRNNRYPNLQLREIAG | 495 |
| R1 | G | HIMEFSQDQHGSRFIELKLERATPAERQLVFNEILQ | 498 |
| R2 | U | AAYQLMVDVFGNYVIQKFFEFGSLEQKLALAERIRG | 490 |
| R3 | C | HVLSLALQMYGSYVIRKALEFIPSDQQNEMVRELDG | 508 |
| R4 | G | HVLKCVKDQNGSYVVEKCIECVQPQSLQFIIDAFKG | 504 |
| R5 | U | QVFALSTHPYGNRVIQRILEHCLPDQTLPILEELHQ | 512 |
| R6 | C | HTEQLVQDQYGSYVIRHVLEHGRPEDKSKIVAEIRG | 502 |
| R7 | G | NVLVLSQHKFASNVVEKCVTHASRTERAVLIDEVCTMNDG | 510 |
| | | PHS | |
| R1 | U | HIMEFSQDQHGNRFIQLKLERATPAERQLVFNEILQ | 497 |
| R2 | C | AAYQLMVDVFGSYVIRKFFEFGSLEQKLALAERIRG | 492 |
| R3 | G | HVLSLALQMYGSRVIEKALEFIPSDQQNEMVRELDG | 507 |
| R4 | U | HVLKCVKDQNGNHVVQKCIECVQPQSLQFIIDAFKG | 503 |
| R5 | C | QVFALSTHPYGSRVIRRILEHCLPDQTLPILEELHQ | 514 |
| R6 | G | HTEQLVQDQYGSYVIEHVLEHGRPEDKSKIVAEIRG | 501 |
| R7 | U | NVLVLSQHKFANNVVQKCVTHASRTERAVLIDEVCTMND | 509 |
| | | GPHS | |
| R8 | C | ALYTMMKDQYASYVVRKMIDVAEPGQRKIVMHKIRP | 494 |
| PUF R8′ | — | HIATLRKYTYGKHILAKLEKYYMKNGVDLG | 496 |

[0637] An exemplary 16-mer RNA recognition (16PUF) targeting

(SEQ ID NO: 475)
CUGCUGCUGCUGCUGC

comprises the amino acid sequence:

(SEQ ID NO: 486)
GRSRLLEDFRNNRYPNLQLREIAGHIMEFSQDQHGSRFIRLKLERATPA
ERQLVFNEILQAAYQLMVDVFGSYVIEKFFEFGSLEQKLALAERIRGHV
LSLALQMYGNRVIQKALEFIPSDQQNEMVRELDGHVLKCVKDQNGSYVV
RKCIECVQPQSLQFIIDAFKGQVFALSTHPYGSRVIERILEHCLPDQTL
PILEELHQHIMEFSQDQHGNRFIQLKLERATPAERQLVFNEILQAAYQL
MVDVFGSYVIRKFFEFGSLEQKLALAERIRGHVLSLALQMYGSRVIEKA
LEFIPSDQQNEMVRELDGHVLKCVKDQNGNHVVQKCIECVQPQSLQFII
DAFKGQVFALSTHPYGSRVIRRILEHCLPDQTLPILEELHQHTEQLVQD
QYGSYVIEHVLEHGRPEDKSKIVAEIRGNVLVLSQHKFANNVVQKCVTH
ASRTERAVLIDEVCTMNDGPHSALYTMMKDQYASYVVRKMIDVAEPGQR
KIVMHKIRPHTEQLVQDQYGSYVIEHVLEHGRPEDKSKIVAEIRGNVLV
LSQHKFANNVVQKCVTHASRTERAVLIDEVCTMNDGPHSALYTMMKDQY
ASYVVRKMIDVAEPGQRKIVMHKIRPHIATLRKYTYGKHILAKLEKYYM
KNGVDLG.

In some aspects, SEQ ID NO: 486 comprises an architecture proceeding from the N-terminus to the C-terminus according to: R1′-R1-R2-R3-R4-R5-R1-R2-R3-R4-R5-R6-R7-R8-R6-R7-R8-R8′. In some aspects, SEQ ID NO: 486 is comprised of the sequences detailed in Table 30.

TABLE 30
16PUF protein according to SEQ ID NO: 486

| PUF | RNA | | SEQ |
|---|---|---|---|
| Module | Recognition | Amino Acid Sequence | ID NO |
| PUF R1′ | — | GRSRLLEDFRNNRYPNLQLREIAG | 495 |
| R1 | C | HIMEFSQDQHGSRFIRLKLERATPAERQLVFNEILQ | 499 |
| R2 | G | AAYQLMVDVFGSYVIEKFFEFGSLEQKLALAERIRG | 491 |
| R3 | U | HVLSLALQMYGNRVIQKALEFIPSDQQNEMVRELDG | 506 |
| R4 | C | HVLKCVKDQNGSYVVRKCIECVQPQSLQFIIDAFKG | 505 |
| R5 | G | QVFALSTHPYGSRVIERILEHCLPDQTLPILEELHQ | 513 |
| R1 | U | HIMEFSQDQHGNRFIQLKLERATPAERQLVFNEILQ | 497 |
| R2 | C | AAYQLMVDVFGSYVIRKFFEFGSLEQKLALAERIRG | 492 |
| R3 | G | HVLSLALQMYGSRVIEKALEFIPSDQQNEMVRELDG | 507 |
| R4 | U | HVLKCVKDQNGNHVVQKCIECVQPQSLQFIIDAFKG | 503 |
| R5 | C | QVFALSTHPYGSRVIRRILEHCLPDQTLPILEELHQ | 514 |
| R6 | G | HTEQLVQDQYGSYVIEHVLEHGRPEDKSKIVAEIRG | 501 |
| R7 | U | NVLVLSQHKFANNVVQKCVTHASRTERAVLIDEVCTMND | 509 |
| | | GPHS | |
| R8 | C | ALYTMMKDQYASYVVRKMIDVAEPGQRKIVMHKIRP | 494 |
| R6 | G | HTEQLVQDQYGSYVIEHVLEHGRPEDKSKIVAEIRG | 501 |
| R7 | U | NVLVLSQHKFANNVVQKCVTHASRTERAVLIDEVCTMND | 509 |
| | | GPHS | |
| R8 | C | ALYTMMKDQYASYVVRKMIDVAEPGQRKIVMHKIRP | 494 |
| PUF R8′ | - | HIATLRKYTYGKHILAKLEKYYMKNGVDLG | 496 |

[0638] An exemplary 16-mer RNA recognition 16PUF targeting

(SEQ ID NO: 475)
CUGCUGCUGCUGCUGC

comprises the amino acid sequence:

(SEQ ID NO: 487)
GRSRLLEDFRNNRYPNLQLREIAGHIMEFSQDQHGSRFIRLKLERATPA
ERQLVFNEILQAAYQLMVDVFGSYVIEKFFEFGSLEQKLALAERIRGHV
LSLALQMYGNRVIQKALEFIPSDQQNEMVRELDGHVLKCVKDQNGSYVV
RKCIECVQPQSLQFIIDAFKGQVFALSTHPYGSRVIERILEHCLPDQTL
PILEELHQHTEQLVQDQYGNYVIQHVLEHGRPEDKSKIVAEIRGHIMEF
SQDQHGSRFIRLKLERATPAERQLVFNEILQAAYQLMVDVFGSYVIEKF
FEFGSLEQKLALAERIRGHVLSLALQMYGNRVIQKALEFIPSDQQNEMV
RELDGHVLKCVKDQNGSYVVRKCIECVQPQSLQFIIDAFKGQVFALSTH
PYGSRVIERILEHCLPDQTLPILEELHQHTEQLVQDQYGNYVIQHVLEH
GRPEDKSKIVAEIRGNVLVLSQHKFASYVVRKCVTHASRTERAVLIDEV
CTMNDGPHSALYTMMKDQYASYVVEKMIDVAEPGQRKIVMHKIRPNVLV
LSQHKFANNVVQKCVTHASRTERAVLIDEVCTMNDGPHSALYTMMKDQY
ASYVVRKMIDVAEPGQRKIVMHKIRPHIATLRKYTYGKHILAKLEKYYM
KNGVDLG

In some aspects, SEQ ID NO: 487 comprises an architecture proceeding from the N-terminus to the C-terminus according to: R1′-R1-R2-R3-R4-R5-R6-R1-R2-R3-R4-R5-R6-R7-R8-R7-R8-R8′. In some aspects, SEQ ID NO: 487 is comprised of the sequences detailed in Table 31.

TABLE 31
16PUF protein according to SEQ ID NO: 487

| PUF | RNA | | SEQ |
|---|---|---|---|
| Module | Recognition | Amino Acid Sequence | ID NO |
| PUF R1′ | — | GRSRLLEDFRNNRYPNLQLREIAG | 495 |
| R1 | C | HIMEFSQDQHGSRFIRLKLERATPAERQLVFNEILQ | 498 |
| R2 | G | AAYQLMVDVFGSYVIEKFFEFGSLEQKLALAERIRG | 490 |
| R3 | U | HVLSLALQMYGNRVIQKALEFIPSDQQNEMVRELDG | 508 |
| R4 | C | HVLKCVKDQNGSYVVRKCIECVQPQSLQFIIDAFKG | 504 |
| R5 | G | QVFALSTHPYGSRVIERILEHCLPDQTLPILEELHQ | 512 |
| R6 | U | HTEQLVQDQYGNYVIQHVLEHGRPEDKSKIVAEIRG | 500 |
| R1 | C | HIMEFSQDQHGSRFIRLKLERATPAERQLVFNEILQ | 499 |
| R2 | G | AAYQLMVDVFGSYVIEKFFEFGSLEQKLALAERIRG | 491 |
| R3 | U | HVLSLALQMYGNRVIQKALEFIPSDQQNEMVRELDG | 506 |
| R4 | C | HVLKCVKDQNGSYVVRKCIECVQPQSLQFIIDAFKG | 505 |
| R5 | G | QVFALSTHPYGSRVIERILEHCLPDQTLPILEELHQ | 513 |
| R6 | U | HTEQLVQDQYGNYVIQHVLEHGRPEDKSKIVAEIRG | 500 |
| R7 | C | NVLVLSQHKFASYVVRKCVTHASRTERAVLIDEVCTMNDG | 511 |
| | | PHS | |
| R8 | G | ALYTMMKDQYASYVVEKMIDVAEPGQRKIVMHKIRP | 489 |
| R7 | U | NVLVLSQHKFANNVVQKCVTHASRTERAVLIDEVCTMND | 509 |
| | | GPHS | |
| R8 | C | ALYTMMKDQYASYVVRKMIDVAEPGQRKIVMHKIRP | 494 |
| PUF R8′ | — | HIATLRKYTYGKHILAKLEKYYMKNGVDLG | 496 |

[0639] An exemplary 16-mer RNA recognition (16PUF) targeting

(SEQ ID NO: 475)
CUGCUGCUGCUGCUGC

comprises ne amino acid sequence:

(SEQ ID NO: 488)
GRSRLLEDFRNNRYPNLQLREIAGHIMEFSQDQHGSRFIRLKLERATPA
ERQLVFNEILQAAYQLMVDVFGSYVIEKFFEFGSLEQKLALAERIRGHV
LSLALQMYGNRVIQKALEFIPSDQQNEMVRELDGHVLKCVKDQNGSYVV
RKCIECVQPQSLQFIIDAFKGQVFALSTHPYGSRVIERILEHCLPDQTL
PILEELHQHTEQLVQDQYGNYVIQHVLEHGRPEDKSKIVAEIRGNVLVL
SQHKFASYVVRKCVTHASRTERAVLIDEVCTMNDGPHSALYTMMKDQYA
SYVVEKMIDVAEPGQRKIVMHKIRPHIMEFSQDQHGNRFIQLKLERATP
AERQLVFNEILQAAYQLMVDVFGSYVIRKFFEFGSLEQKLALAERIRGH
VLSLALQMYGSRVIEKALEFIPSDQQNEMVRELDGHVLKCVKDQNGNHV
VQKCIECVQPQSLQFIIDAFKGQVFALSTHPYGSRVIRRILEHCLPDQT
LPILEELHQHTEQLVQDQYGSYVIEHVLEHGRPEDKSKIVAEIRGNVLV
LSQHKFANNVVQKCVTHASRTERAVLIDEVCTMNDGPHSALYTMMKDQY
ASYVVRKMIDVAEPGQRKIVMHKIRPHIATLRKYTYGKHILAKLEKYYM
KNGVDLG

In some aspects, SEQ ID NO: 488 comprises an architecture proceeding from the N-terminus to the C-terminus according to: R1′-R1-R2-R3-R4-R5-R6-R7-R8-R1-R2-R3-R4-R5-R6-R7-R8-R8′. In some aspects, SEQ ID NO: 488 is comprised of the sequences detailed in Table 32.

TABLE 32
16PUF protein according to SEQ ID NO: 488

| PUF | RNA | | SEQ |
|---|---|---|---|
| Module | Recognition | Amino Acid Sequence | ID NO |
| PUF R1′ | — | GRSRLLEDFRNNRYPNLQLREIAG | 495 |
| R1 | C | HIMEFSQDQHGSRFIRLKLERATPAERQLVFNEILQ | 498 |
| R2 | G | AAYQLMVDVFGSYVIEKFFEFGSLEQKLALAERIRG | 490 |
| R3 | U | HVLSLALQMYGNRVIQKALEFIPSDQQNEMVRELDG | 508 |
| R4 | C | HVLKCVKDQNGSYVVRKCIECVQPQSLQFIIDAFKG | 504 |
| R5 | G | QVFALSTHPYGSRVIERILEHCLPDQTLPILEELHQ | 512 |
| R6 | U | HTEQLVQDQYGNYVIQHVLEHGRPEDKSKIVAEIRG | 500 |
| R7 | C | NVLVLSQHKFASYVVRKCVTHASRTERAVLIDEVCTMNDG | 511 |
| | | PHS | |
| R8 | G | ALYTMMKDQYASYVVEKMIDVAEPGQRKIVMHKIRP | 489 |
| R1 | U | HIMEFSQDQHGNRFIQLKLERATPAERQLVFNEILQ | 497 |
| R2 | C | AAYQLMVDVFGSYVIRKFFEFGSLEQKLALAERIRG | 492 |
| R3 | G | HVLSLALQMYGSRVIEKALEFIPSDQQNEMVRELDG | 507 |
| R4 | U | HVLKCVKDQNGNHVVQKCIECVQPQSLQFIIDAFKG | 503 |
| R5 | C | QVFALSTHPYGSRVIRRILEHCLPDQTLPILEELHQ | 514 |
| R6 | G | HTEQLVQDQYGSYVIEHVLEHGRPEDKSKIVAEIRG | 501 |
| R7 | U | NVLVLSQHKFANNVVQKCVTHASRTERAVLIDEVCTMND | 509 |
| | | GPHS | |
| R8 | C | ALYTMMKDQYASYVVRKMIDVAEPGQRKIVMHKIRP | 494 |
| PUF R8′ | — | HIATLRKYTYGKHILAKLEKYYMKNGVDLG | 496 |

[0640] An exemplary 8-mer RNA recognition (8PUF) targeting

(SEQ ID NO: 476)
GCUGCUGC

comprises the amino acid sequence:

(SEQ ID NO: 549)
GRSRLLEDFRNNRYPNLQLREIAGHIMEFSQDQHGSRFIRLKLERATPA
ERQLVFNEILQAAYQLMVDVFGSYVIEKFFEFGSLEQKLALAERIRGHV
LSLALQMYGNRVIQKALEFIPSDQQNEMVRELDGHVLKCVKDQNGSYVV
RKCIECVQPQSLQFIIDAFKGQVFALSTHPYGSRVIERILEHCLPDQTL
PILEELHQHTEQLVQDQYGNYVIQHVLEHGRPEDKSKIVAEIRGNVLVL
SQHKFASYVVRKCVTHASRTERAVLIDEVCTMNDGPHSALYTMMKDQYA
SYVVEKMIDVAEPGQRKIVMHKIRPHIATLRKYTYGKHILAKLEKYYMK
NGVDLG.

In some aspects, SEQ ID NO: 549 comprises an architecture proceeding from the N-terminus to the C-terminus according to: R1′-R1-R2-R3-R4-R5-R6-R1-R2-R3-R4-R5-R6-R7-R8-R8′. In some aspects, SEQ ID NO: 549 is comprised of the sequences detailed in Table 33.

TABLE 33
8PUF protein according to SEQ ID NO: 549

| PUF | RNA | | SEQ |
|---|---|---|---|
| Module | Recognition | Amino Acid Sequence | ID NO |
| PUF R1′ | — | GRSRLLEDFRNNRYPNLQLREIAG | 495 |
| R1 | C | HIMEFSQDQHGSRFIRLKLERATPAERQLVFNEILQ | 499 |
| R2 | G | AAYQLMVDVFGSYVIEKFFEFGSLEQKLALAERIRG | 491 |
| R3 | U | HVLSLALQMYGNRVIQKALEFIPSDQQNEMVRELDG | 506 |
| R4 | C | HVLKCVKDQNGSYVVRKCIECVQPQSLQFIIDAFKG | 505 |
| R5 | G | QVFALSTHPYGSRVIERILEHCLPDQTLPILEELHQ | 513 |
| R6 | U | HTEQLVQDQYGNYVIQHVLEHGRPEDKSKIVAEIRG | 500 |
| R7 | C | NVLVLSQHKFASYVVRKCVTHASRTERAVLIDEVCTMNDG | 511 |
| | | PHS | |
| R8 | G | ALYTMMKDQYASYVVEKMIDVAEPGQRKIVMHKIRP | 489 |
| PUF R8′ | — | HIATLRKYTYGKHILAKLEKYYMKNGVDLG | 496 |

[0641] An exemplary 14-mer RNA recognition (14PUF) targeting

(SEQ ID NO: 477)
GCUGCUGCUGCUGC

comprises the amino acid sequence:

(SEQ ID NO: 550)
GRSRLLEDFRNNRYPNLQLREIAGHIMEFSQDQHGSRFIRLKLERATPA
ERQLVFNEILQAAYQLMVDVFGSYVIEKFFEFGSLEQKLALAERIRGHV
LSLALQMYGNRVIQKALEFIPSDQQNEMVRELDGHVLKCVKDQNGSYVV
RKCIECVQPQSLQFIIDAFKGQVFALSTHPYGSRVIERILEHCLPDQTL
PILEELHQHIMEFSQDQHGNRFIQLKLERATPAERQLVFNEILQAAYQL
MVDVFGSYVIRKFFEFGSLEQKLALAERIRGHVLSLALQMYGSRVIEKA
LEFIPSDQQNEMVRELDGHVLKCVKDQNGNHVVQKCIECVQPQSLQFII
DAFKGQVFALSTHPYGSRVIRRILEHCLPDQTLPILEELHQHTEQLVQD
QYGSYVIEHVLEHGRPEDKSKIVAEIRGHTEQLVQDQYGNYVIQHVLEH
GRPEDKSKIVAEIRGNVLVLSQHKFASYVVRKCVTHASRTERAVLIDEV
CTMNDGPHSALYTMMKDQYASYVVEKMIDVAEPGQRKIVMHKIRPHIAT
LRKYTYGKHILAKLEKYYMKNGVDLG.

In some aspects, SEQ ID NO: 550 comprises an architecture proceeding from the N-terminus to the C-terminus according to: R1′-R-R2-R3-R4-R5-R1-R2-R3-R4-R5-R6-R6-R7-R8-R8′. In some aspects, SEQ ID NO: 550 is comprised of the sequences detailed in Table 34.

TABLE 34
14PUF protein according to SEQ ID NO: 550

| PUF | RNA | | SEQ |
|---|---|---|---|
| Module | Recognition | Amino Acid Sequence | ID NO |
| PUF R1′ | — | GRSRLLEDFRNNRYPNLQLREIAG | 495 |
| R1 | C | HIMEFSQDQHGSRFIRLKLERATPAERQLVFNEILQ | 499 |
| R2 | G | AAYQLMVDVFGSYVIEKFFEFGSLEQKLALAERIRG | 491 |
| R3 | U | HVLSLALQMYGNRVIQKALEFIPSDQQNEMVRELDG | 506 |
| R4 | C | HVLKCVKDQNGSYVVRKCIECVQPQSLQFIIDAFKG | 505 |
| R5 | G | QVFALSTHPYGSRVIERILEHCLPDQTLPILEELHQ | 513 |
| R1 | U | HIMEFSQDQHGNRFIQLKLERATPAERQLVFNEILQ | 497 |
| R2 | C | AAYQLMVDVFGSYVIRKFFEFGSLEQKLALAERIRG | 492 |
| R3 | G | HVLSLALQMYGSRVIEKALEFIPSDQQNEMVRELDG | 507 |
| R4 | U | HVLKCVKDQNGNHVVQKCIECVQPQSLQFIIDAFKG | 503 |
| R5 | C | QVFALSTHPYGSRVIRRILEHCLPDQTLPILEELHQ | 514 |
| R6 | G | HTEQLVQDQYGSYVIEHVLEHGRPEDKSKIVAEIRG | 501 |
| R6 | U | HTEQLVQDQYGNYVIQHVLEHGRPEDKSKIVAEIRG | 500 |
| R7 | C | NVLVLSQHKFASYVVRKCVTHASRTERAVLIDEVCTMNDG | 511 |
| | | PHS | |
| R8 | G | ALYTMMKDQYASYVVEKMIDVAEPGQRKIVMHKIRP | 489 |
| PUF R8′ | — | HIATLRKYTYGKHILAKLEKYYMKNGVDLG | 496 |

[0642] An exemplary 14-mer RNA recognition (14PUF) targeting

(SEQ ID NO: 477)
GCUGCUGCUGCUGC

comprises the amino acid sequence:

(SEQ ID NO: 551)
GRSRLLEDFRNNRYPNLQLREIAGHIMEFSQDQHGSRFIRLKLERATPA
ERQLVFNEILQAAYQLMVDVFGSYVIEKFFEFGSLEQKLALAERIRGHV
LSLALQMYGNRVIQKALEFIPSDQQNEMVRELDGHVLKCVKDQNGSYVV
RKCIECVQPQSLQFIIDAFKGQVFALSTHPYGSRVIERILEHCLPDQTL
PILEELHQHTEQLVQDQYGNYVIQHVLEHGRPEDKSKIVAEIRGHIMEF
SQDQHGSRFIRLKLERATPAERQLVFNEILQAAYQLMVDVFGSYVIEKF
FEFGSLEQKLALAERIRGHVLSLALQMYGNRVIQKALEFIPSDQQNEMV
RELDGHVLKCVKDQNGSYVVRKCIECVQPQSLQFIIDAFKGQVFALSTH
PYGSRVIERILEHCLPDQTLPILEELHQHTEQLVQDQYGNYVIQHVLEH
GRPEDKSKIVAEIRGNVLVLSQHKFASYVVRKCVTHASRTERAVLIDEV
CTMNDGPHSALYTMMKDQYASYVVEKMIDVAEPGQRKIVMHKIRPHIAT
LRKYTYGKHILAKLEKYYMKNGVDLG.

In some aspects, SEQ ID NO: 551 comprises an architecture proceeding from the N-terminus to the C-terminus according to: R1′-R1-R2-R3-R4-R5-R6-R1-R2-R3-R4-R5-R6-R7-R8-R8′. In some aspects, SEQ ID NO: 551 is comprised of the sequences detailed in Table 35.

TABLE 35
14PUF protein according to SEQ ID NO: 551

| PUF | RNA | | SEQ |
|---|---|---|---|
| Module | Recognition | Amino Acid Sequence | ID NO |
| PUF R1′ | — | GRSRLLEDFRNNRYPNLQLREIAG | 495 |
| R1 | C | HIMEFSQDQHGSRFIRLKLERATPAERQLVFNEILQ | 499 |
| R2 | G | AAYQLMVDVFGSYVIEKFFEFGSLEQKLALAERIRG | 491 |
| R3 | U | HVLSLALQMYGNRVIQKALEFIPSDQQNEMVRELDG | 506 |
| R4 | C | HVLKCVKDQNGSYVVRKCIECVQPQSLQFIIDAFKG | 505 |
| R5 | G | QVFALSTHPYGSRVIERILEHCLPDQTLPILEELHQ | 513 |
| R6 | U | HTEQLVQDQYGNYVIQHVLEHGRPEDKSKIVAEIRG | 500 |
| R1 | C | HIMEFSQDQHGSRFIRLKLERATPAERQLVFNEILQ | 499 |
| R2 | G | AAYQLMVDVFGSYVIEKFFEFGSLEQKLALAERIRG | 491 |
| R3 | U | HVLSLALQMYGNVIQKALEFIPSDQQNEMVRELDG | 506 |
| R4 | C | HVLKCVKDQNGSYVVRKCIECVQPQSLQFIIDAFKG | 505 |
| R5 | G | QVFALSTHPYGSRVIERILEHCLPDQTLPILEELHQ | 513 |
| R6 | U | HTEQLVQDQYGNYVIQHVLEHGRPEDKSKIVAEIRG | 500 |
| R7 | C | NVLVLSQHKFASYVVRKCVTHASRTERAVLIDEVCTMNDG | 511 |
| | | PHS | |
| R8 | G | ALYTMMKDQYASYVVEKMIDVAEPGQRKIVMHKIRP | 489 |
| PUF R8′ | — | HIATLRKYTYGKHILAKLEKYYMKNGVDLG | 496 |

[0643] An exemplary 15-mer RNA recognition (15PUF) targeting

(SEQ ID NO: 478)
GCUGCUGCUGCUGCU

comprises the amino acid sequence:

(SEQ ID NO: 552)
GRSRLLEDFRNNRYPNLQLREIAGHIMEFSQDQHGNRFIQLKLERATPA
ERQLVFNEILQAAYQLMVDVFGSYVIRKFFEFGSLEQKLALAERIRGHV
LSLALQMYGSRVIEKALEFIPSDQQNEMVRELDGHVLKCVKDQNGNHVV
QKCIECVQPQSLQFIIDAFKGQVFALSTHPYGSRVIRRILEHCLPDQTL
PILEELHQHIMEFSQDQHGSRFIELKLERATPAERQLVFNEILQAAYQL
MVDVFGNYVIQKFFEFGSLEQKLALAERIRGHVLSLALQMYGSYVIRKA
LEFIPSDQQNEMVRELDGHVLKCVKDQNGSYVVEKCIECVQPQSLQFII
DAFKGQVFALSTHPYGNRVIQRILEHCLPDQTLPILEELHQHTEQLVQD
QYGSYVIRHVLEHGRPEDKSKIVAEIRGNVLVLSQHKFASNVVEKCVTH
ASRTERAVLIDEVCTMNDGPHSHTEQLVQDQYGNYVIQHVLEHGRPEDK
SKIVAEIRGNVLVLSQHKFASYVVRKCVTHASRTERAVLIDEVCTMNDG
PHSALYTMMKDQYASYVVEKMIDVAEPGQRKIVMHKIRPHIATLRKYTY
GKHILAKLEKYYMKNGVDLG.

In some aspects, SEQ ID NO: 552 comprises an architecture proceeding from the N-terminus to the C-terminus according to: R1′-R1-R2-R3-R4-R5-R1-R2-R3-R4-R5-R6-R7-R6-R7-R8-R8′. In some aspects, SEQ ID NO: 552 is comprised of the sequences detailed in Table 36.

TABLE 36
15PUF protein according to SEQ ID NO: 552

| PUF | RNA | | SEQ |
|---|---|---|---|
| Module | Recognition | Amino Acid Sequence | ID NO |
| PUF R1′ | — | GRSRLLEDFRNNRYPNLQLREIAG | 495 |
| R1 | U | HIMEFSQDQHGNRFIQLKLERATPAERQLVFNEILQ | 499 |
| R2 | C | AAYQLMVDVFGSYVIRKFFEFGSLEQKLALAERIRG | 491 |
| R3 | G | HVLSLALQMYGSRVIEKALEFIPSDQQNEMVRELDG | 506 |
| R4 | U | HVLKCVKDQNGNHVVQKCIECVQPQSLQFIIDAFKG | 505 |
| R5 | C | QVFALSTHPYGSRVIRRILEHCLPDQTLPILEELHQ | 513 |
| R1 | G | HIMEFSQDQHGSRFIELKLERATPAERQLVFNEILQ | 498 |
| R2 | U | AAYQLMVDVFGNYVIQKFFEFGSLEQKLALAERIRG | 490 |
| R3 | C | HVLSLALQMYGSYVIRKALEFIPSDQQNEMVRELDG | 508 |
| R4 | G | HVLKCVKDQNGSYVVEKCIECVQPQSLQFIIDAFKG | 54 |
| R5 | U | QVFALSTHPYGNRVIQRILEHCLPDQTLPILEELHQ | 512 |
| R6 | C | HTEQLVQDQYGSYVIRHVLEHGRPEDKSKIVAEIRG | 502 |
| R7 | G | NVLVLSQHKFASNVVEKCVTHASRTERAVLIDEVCTMNDG | 510 |
| | | PHS | |
| R6 | U | HTEQLVQDQYGNYVIQHVLEHGRPEDKSKIVAEIRG | 50 |
| R7 | C | NVLVLSQHKFASYVVRKCVTHASRTERAVLIDEVCTMNDG | 511 |
| | | PHS | |
| R8 | G | ALYTMMKDQYASYVVEKMIDVAEPGQRKIVMHKIRP | 489 |
| PUF R8′ | — | HIATLRKYTYGKHILAKLEKYYMKNGVDLG | 496 |

[0644] An exemplary 15-mer RNA recognition (15PUF) targeting

(SEQ ID NO: 478)
GCUGCUGCUGCUGCU

comprises the amino acid sequence:

(SEQ ID NO: 553)
GRSRLLEDFRNNRYPNLQLREIAGHIMEFSQDQHGNRFIQLKLERATPA
ERQLVFNEILQAAYQLMVDVFGSYVIRKFFEFGSLEQKLALAERIRGHV
LSLALQMYGSRVIEKALEFIPSDQQNEMVRELDGHVLKCVKDQNGNHVV
QKCIECVQPQSLQFIIDAFKGQVFALSTHPYGSRVIRRILEHCLPDQTL
PILEELHQHTEQLVQDQYGSYVIEHVLEHGRPEDKSKIVAEIRGHIMEF
SQDQHGNRFIQLKLERATPAERQLVFNEILQAAYQLMVDVFGSYVIRKF
FEFGSLEQKLALAERIRGHVLSLALQMYGSRVIEKALEFIPSDQQNEMV
RELDGHVLKCVKDQNGNHVVQKCIECVQPQSLQFIIDAFKGQVFALSTH
PYGSRVIRRILEHCLPDQTLPILEELHQHTEQLVQDQYGSYVIEHVLEH
GRPEDKSKIVAEIRGNVLVLSQHKFANNVVQKCVTHASRTERAVLIDEV
CTMNDGPHSNVLVLSQHKFASYVVRKCVTHASRTERAVLIDEVCTMNDG
PHSALYTMMKDQYASYVVEKMIDVAEPGQRKIVMHKIRPHIATLRKYTY
GKHILAKLEKYYMKNGVDLG.

In some aspects, SEQ ID NO: 553 comprises an architecture proceeding from the N-terminus to the C-terminus according to: R1′-R1-R2-R3-R4-R5-R6-R1-R2-R3-R4-R5-R6-R7-R7-R8-R8′. In some aspects, SEQ ID NO: 553 is comprised of the sequences detailed in Table 37.

TABLE 37
15PUF protein according to SEQ ID NO: 553

| PUF | RNA | | SEQ |
|---|---|---|---|
| Module | Recognition | Amino Acid Sequence | ID NO |
| PUF R1′ | — | GRSRLLEDFRNNRYPNLQLREIAG | 495 |
| R1 | U | HIMEFSQDQHGNRFIQLKLERATPAERQLVFNEILQ | 499 |
| R2 | C | AAYQLMVDVFGSYVIRKFFEFGSLEQKLALAERIRG | 491 |
| R3 | G | HVLSLALQMYGSRVIEKALEFIPSDQQNEMVRELDG | 506 |
| R4 | U | HVLKCVKDQNGNHVVQKCIECVQPQSLQFIIDAFKG | 505 |
| R5 | C | QVFALSTHPYGSRVIRRILEHCLPDQTLPILEELHQ | 513 |
| R6 | G | HTEQLVQDQYGSYVIEHVLEHGRPEDKSKIVAEIRG | 500 |
| R1 | U | HIMEFSQDQHGNRFIQLKLERATPAERQLVFNEILQ | 497 |
| R2 | C | AAYQLMVDVFGSYVIRKFFEFGSLEQKLALAERIRG | 492 |
| R3 | G | HVLSLALQMYGSRVIEKALEFIPSDQQNEMVRELDG | 507 |
| R4 | U | HVLKCVKDQNGNHVVQKCIECVQPQSLQFIIDAFKG | 503 |
| R5 | C | QVFALSTHPYGSRVIRRILEHCLPDQTLPILEELHQ | 514 |
| R6 | G | HTEQLVQDQYGSYVIEHVLEHGRPEDKSKIVAEIRG | 501 |
| R7 | U | NVLVLSQHKFANNVVQKCVTHASRTERAVLIDEVCTMND | 509 |
| | | GPHS | |
| R7 | C | NVLVLSQHKFASYVVRKCVTHASRTERAVLIDEVCTMNDG | 511 |
| | | PHS | |
| R8 | G | ALYTMMKDQYASYVVEKMIDVAEPGQRKIVMHKIRP | 489 |
| PUF R8′ | — | HIATLRKYTYGKHILAKLEKYYMKNGVDLG | 496 |

[0645] An exemplary 15-mer RNA recognition (15PUF) targeting

(SEQ ID NO: 478)
GCUGCUGCUGCUGCU

comprises the amino acid sequence:

(SEQ ID NO: 554)
GRSRLLEDFRNNRYPNLQLREIAGHIMEFSQDQHGNRFIQLKLERATPA
ERQLVFNEILQAAYQLMVDVFGSYVIRKFFEFGSLEQKLALAERIRGHV
LSLALQMYGSRVIEKALEFIPSDQQNEMVRELDGHVLKCVKDQNGNHVV
QKCIECVQPQSLQFIIDAFKGQVFALSTHPYGSRVIRRILEHCLPDQTL
PILEELHQHTEQLVQDQYGSYVIEHVLEHGRPEDKSKIVAEIRGNVLVL
SQHKFANNVVQKCVTHASRTERAVLIDEVCTMNDGPHSHIMEFSQDQHG
SRFIRLKLERATPAERQLVFNEILQAAYQLMVDVFGSYVIEKFFEFGSL
EQKLALAERIRGHVLSLALQMYGNRVIQKALEFIPSDQQNEMVRELDGH
VLKCVKDQNGSYVVRKCIECVQPQSLQFIIDAFKGQVFALSTHPYGSRV
IERILEHCLPDQTLPILEELHQHTEQLVQDQYGNYVIQHVLEHGRPEDK
SKIVAEIRGNVLVLSQHKFASYVVRKCVTHASRTERAVLIDEVCTMNDG
PHSALYTMMKDQYASYVVEKMIDVAEPGQRKIVMHKIRPHIATLRKYTY
GKHILAKLEKYYMKNGVDLG.

In some aspects, SEQ ID NO: 554 comprises an architecture proceeding from the N-terminus to the C-terminus according to: R1′-R1-R2-R3-R4-R5-R6-R7-R1-R2-R3-R4-R5-R6-R7-R8-R8′. In some aspects, SEQ ID NO: 554 is comprised of the sequences detailed in Table 38.

TABLE 38
15PUF protein according to SEQ ID NO: 554

| PUF | RNA | | SEQ |
|---|---|---|---|
| Module | Recognition | Amino Acid Sequence | ID NO |
| PUF R1′ | — | GRSRLLEDFRNNRYPNLQLREIAG | 495 |
| R1 | U | HIMEFSQDQHGNRFIQLKLERATPAERQLVFNEILQ | 499 |
| R2 | C | AAYQLMVDVFGSYVIRKFFEFGSLEQKLALAERIRG | 491 |
| R3 | G | HVLSLALQMYGSRVIEKALEFIPSDQQNEMVRELDG | 506 |
| R4 | U | HVLKCVKDQNGNHVVQKCIECVQPQSLQFIIDAFKG | 505 |
| R5 | C | QVFALSTHPYGSRVIRRILEHCLPDQTLPILEELHQ | 513 |
| R6 | G | HTEQLVQDQYGSYVIEHVLEHGRPEDKSKIVAEIRG | 500 |
| R7 | U | NVLVLSQHKFANNVVQKCVTHASRTERAVLIDEVCTMND | 509 |
| | | GPHS | |
| R1 | C | HIMEFSQDQHGSRFIRLKLERATPAERQLVFNEILQ | 499 |
| R2 | G | AAYQLMVDVFGSYVIEKFFEFGSLEQKLALAERIRG | 491 |
| R3 | U | HVLSLALQMYGNRVIQKALEFIPSDQQNEMVRELDG | 506 |
| R4 | C | HVLKCVKDQNGSYVVRKCIECVQPQSLQFIIDAFKG | 505 |
| R5 | G | QVFALSTHPYGSRVIERILEHCLPDQTLPILEELHQ | 513 |
| R6 | U | HTEQLVQDQYGNYVIQHVLEHGRPEDKSKIVAEIRG | 500 |
| R7 | C | NVLVLSQHKFASYVVRKCVTHASRTERAVLIDEVCTMNDG | 511 |
| | | PHS | |
| R8 | G | ALYTMMKDQYASYVVEKMIDVAEPGQRKIVMHKIRP | 489 |
| PUF R8′ | — | HIATLRKYTYGKHILAKLEKYYMKNGVDLG | 496 |

[0646] An exemplary 16-mer RNA recognition (16PUF) targeting

(SEQ ID NO: 479)
GCUGCUGCUGCUGCUG

comprises the amino acid sequence:

(SEQ ID NO: 555)
GRSRLLEDFRNNRYPNLQLREIAGHIMEFSQDQHGSRFIELKLERATPA
ERQLVFNEILQAAYQLMVDVFGNYVIQKFFEFGSLEQKLALAERIRGHV
LSLALOMYGSYVIRKALEFIPSDQQNEMVRELDGHVLKCVKDQNGSYVV
EKCIECVQPQSLQFIIDAFKGQVFALSTHPYGNRVIQRILEHCLPDQTL
PILEELHQHIMEFSQDQHGSRFIRLKLERATPAERQLVFNEILQAAYQL
MVDVFGSYVIEKFFEFGSLEQKLALAERIRGHVLSLALQMYGNRVIQKA
LEFIPSDQQNEMVRELDGHVLKCVKDQNGSYVVRKCIECVQPQSLQFII
DAFKGQVFALSTHPYGSRVIERILEHCLPDQTLPILEELHQHTEQLVQD
QYGNYVIQHVLEHGRPEDKSKIVAEIRGNVLVLSQHKFASYVVRKCVTH
ASRTERAVLIDEVCTMNDGPHSALYTMMKDQYASYVVEKMIDVAEPGQR
KIVMHKIRPHTEQLVQDQYGNYVIQHVLEHGRPEDKSKIVAEIRGNVLV
LSQHKFASYVVRKCVTHASRTERAVLIDEVCTMNDGPHSALYTMMKDQY
ASYVVEKMIDVAEPGQRKIVMHKIRPHIATLRKYTYGKHILAKLEKYYM
KNGVDLG.

In some aspects, SEQ ID NO: 555 comprises an architecture proceeding from the N-terminus to the C-terminus according to: R1′-R1-R2-R3-R4-R5-R1-R2-R3-R4-R5-R6-R7-R8-R6-R7-R8-R8′. In some aspects, SEQ ID NO: 555 is comprised of the sequences detailed in Table 39.

TABLE 39
16PUF protein according to SEQ ID NO: 555

| PUF | RNA | | SEQ |
|---|---|---|---|
| Module | Recognition | Amino Acid Sequence | ID NO |
| PUF R1′ | — | GRSRLLEDFRNNRYPNLQLREIAG | 495 |
| R1 | G | HIMEFSQDQHGSRFIELKLERATPAERQLVFNEILQ | 499 |
| R2 | U | AAYQLMVDVFGNYVIQKFFEFGSLEQKLALAERIRG | 491 |
| R3 | C | HVLSLALQMYGSYVIRKALEFIPSDQQNEMVRELDG | 506 |
| R4 | G | HVLKCVKDQNGSYVVEKCIECVQPQSLQFIIDAFKG | 505 |
| R5 | U | QVFALSTHPYGNRVIQRILEHCLPDQTLPILEELHQ | 513 |
| R1 | C | HIMEFSQDQHGSRFIRLKLERATPAERQLVFNEILQ | 499 |
| R2 | G | AAYQLMVDVFGSYVIEKFFEFGSLEQKLALAERIRG | 491 |
| R3 | U | HVLSLALQMYGNRVIQKALEFIPSDQQNEMVRELDG | 506 |
| R4 | C | HVLKCVKDQNGSYVVRKCIECVQPQSLQFIIDAFKG | 505 |
| R5 | G | QVFALSTHPYGSRVIERILEHCLPDQTLPILEELHQ | 513 |
| R6 | U | HTEQLVQDQYGNYVIQHVLEHGRPEDKSKIVAEIRG | 500 |
| R7 | C | NVLVLSQHKFASYVVRKCVTHASRTERAVLIDEVCTMNDG | 511 |
| | | PHS | |
| R8 | G | ALYTMMKDQYASYVVEKMIDVAEPGQRKIVMHKIRP | 489 |
| R6 | U | HTEQLVQDQYGNYVIQHVLEHGRPEDKSKIVAEIRG | 500 |
| R7 | C | NVLVLSQHKFASYVVRKCVTHASRTERAVLIDEVCTMNDG | 511 |
| | | PHS | |
| R8 | G | ALYTMMKDQYASYVVEKMIDVAEPGQRKIVMHKIRP | 489 |
| PUF R8′ | — | HIATLRKYTYGKHILAKLEKYYMKNGVDLG | 496 |

[0647] An exemplary 16-mer RNA recognition (16PUF) targeting

(SEQ ID NO: 479)
GCUGCUGCUGCUGCUG

comprises the amino acid sequence:

(SEQ ID NO: 556)
GRSRLLEDFRNNRYPNLQLREIAGHIMEFSQDQHGSRFIELKLERATPA
ERQLVFNEILQAAYQLMVDVFGNYVIQKFFEFGSLEQKLALAERIRGHV
LSLALQMYGSYVIRKALEFIPSDQQNEMVRELDGHVLKCVKDQNGSYVV
EKCIECVQPQSLQFIIDAFKGQVFALSTHPYGNRVIQRILEHCLPDQTL
PILEELHQHTEQLVQDQYGSYVIRHVLEHGRPEDKSKIVAEIRGHIMEF
SQDQHGSRFIELKLERATPAERQLVFNEILQAAYQLMVDVFGNYVIQKF
FEFGSLEQKLALAERIRGHVLSLALQMYGSYVIRKALEFIPSDQQNEMV
RELDGHVLKCVKDQNGSYVVEKCIECVQPQSLQFIIDAFKGQVFALSTH
PYGNRVIQRILEHCLPDQTLPILEELHQHTEQLVQDQYGSYVIRHVLEH
GRPEDKSKIVAEIRGNVLVLSQHKFASNVVEKCVTHASRTERAVLIDEV
CTMNDGPHSALYTMMKDQYANYVVQKMIDVAEPGQRKIVMHKIRPNVLV
LSQHKFASYVVRKCVTHASRTERAVLIDEVCTMNDGPHSALYTMMKDQY
ASYVVEKMIDVAEPGQRKIVMHKIRPHIATLRKYTYGKHILAKLEKYYM
KNGVDLG

In some aspects, SEQ ID NO: 556 comprises an architecture proceeding from the N-terminus to the C-terminus according to: R1′-R1-R2-R3-R4-R5-R6-R1-R2-R3-R4-R5-R6-R7-R8-R7-R8-R8′. In some aspects, SEQ ID NO: 556 is comprised of the sequences detailed in Table 40.

TABLE 40
16PUF protein according to SEQ ID NO: 556

| PUF | RNA | | SEQ |
|---|---|---|---|
| Module | Recognition | Amino Acid Sequence | ID NO |
| PUF R1′ | — | GRSRLLEDFRNNRYPNLQLREIAG | 495 |
| R1 | G | HIMEFSQDQHGSRFIELKLERATPAERQLVFNEILQ | 499 |
| R2 | U | AAYQLMVDVFGNYVIQKFFEFGSLEQKLALAERIRG | 491 |
| R3 | C | HVLSLALQMYGSYVIRKALEFIPSDQQNEMVRELDG | 506 |
| R4 | G | HVLKCVKDQNGSYVVEKCIECVQPQSLQFIIDAFKG | 505 |
| R5 | U | QVFALSTHPYGNRVIQRILEHCLPDQTLPILEELHQ | 513 |
| R6 | C | HTEQLVQDQYGSYVIRHVLEHGRPEDKSKIVAEIRG | 500 |
| R1 | G | HIMEFSQDQHGSRFIELKLERATPAERQLVFNEILQ | 498 |
| R2 | U | AAYQLMVDVFGNYVIQKFFEFGSLEQKLALAERIRG | 490 |
| R3 | C | HVLSLALQMYGSYVIRKALEFIPSDQQNEMVRELDG | 508 |
| R4 | G | HVLKCVKDQNGSYVVEKCIECVQPQSLQFIIDAFKG | 504 |
| R5 | U | QVFALSTHPYGNRVIQRILEHCLPDQTLPILEELHQ | 512 |
| R6 | C | HTEQLVQDQYGSYVIRHVLEHGRPEDKSKIVAEIRG | 52 |
| R7 | G | NVLVLSQHKFASNVVEKCVTHASRTERAVLIDEVCTMNDG | 510 |
| | | PHS | |
| R8 | U | ALYTMMKDQYANYVVQKMIDVAEPGQRKIVMHKIRP | 493 |
| R7 | C | NVLVLSQHKFASYVVRKCVTHASRTERAVLIDEVCTMNDG | 511 |
| | | PHS | |
| R8 | G | ALYTMMKDQYASYVVEKMIDVAEPGQRKIVMHKIRP | 489 |
| PUF R8′ | — | HIATLRKYTYGKHILAKLEKYYMKNGVDLG | 496 |

[0648] An exemplary 16-mer RNA recognition (16PUF) targeting

(SEQ ID NO: 479)
GCUGCUGCUGCUGCUG

comprises the amino acid sequence:

(SEQ ID NO: 557)
GRSRLLEDFRNNRYPNLQLREIAGHIMEFSQDQHGSRFIELKLERATPA
ERQLVFNEILQAAYQLMVDVFGNYVIQKFFEFGSLEQKLALAERIRGHV
LSLALQMYGSYVIRKALEFIPSDQQNEMVRELDGHVLKCVKDQNGSYVV
EKCIECVQPQSLQFIIDAFKGQVFALSTHPYGNRVIQRILEHCLPDQTL
PILEELHQHTEQLVQDQYGSYVIRHVLEHGRPEDKSKIVAEIRGNVLVL
SQHKFASNVVEKCVTHASRTERAVLIDEVCTMNDGPHSALYTMMKDQYA
NYVVQKMIDVAEPGQRKIVMHKIRPHIMEFSQDQHGSRFIRLKLERATP
AERQLVFNEILQAAYQLMVDVFGSYVIEKFFEFGSLEQKLALAERIRGH
VLSLALQMYGNRVIQKALEFIPSDQQNEMVRELDGHVLKCVKDQNGSYV
VRKCIECVQPQSLQFIIDAFKGQVFALSTHPYGSRVIERILEHCLPDQT
LPILEELHQHTEQLVQDQYGNYVIQHVLEHGRPEDKSKIVAEIRGNVLV
LSQHKFASYVVRKCVTHASRTERAVLIDEVCTMNDGPHSALYTMMKDQY
ASYVVEKMIDVAEPGQRKIVMHKIRPHIATLRKYTYGKHILAKLEKYYM
KNGVDLG.

In some aspects, SEQ ID NO: 557 comprises an architecture proceeding from the N-terminus to the C-terminus according to: R1′-R1-R2-R3-R4-R5-R6-R7-R8-R1-R2-R3-R4-R5-R6-R7-R8-R8′. In some aspects, SEQ ID NO: 557 is comprised of the sequences detailed in Table 41.

TABLE 41
16PUF protein according to SEQ ID NO: 557

| PUF | RNA | | SEQ |
|---|---|---|---|
| Module | Recognition | Amino Acid Sequence | ID NO |
| PUF R1′ | — | GRSRLLEDFRNNRYPNLQLREIAG | 495 |
| R1 | G | HIMEFSQDQHGSRFIELKLERATPAERQLVFNEILQ | 499 |
| R2 | U | AAYQLMVDVFGNYVIQKFFEFGSLEQKLALAERIRG | 491 |
| R3 | C | HVLSLALQMYGSYVIRKALEFIPSDQQNEMVRELDG | 506 |
| R4 | G | HVLKCVKDQNGSYVVEKCIECVQPQSLQFIIDAFKG | 505 |
| R5 | U | QVFALSTHPYGNRVIQRILEHCLPDQTLPILEELHQ | 513 |
| R6 | C | HTEQLVQDQYGSYVIRHVLEHGRPEDKSKIVAEIRG | 500 |
| R7 | G | NVLVLSQHKFASNVVEKCVTHASRTERAVLIDEVCTMNDG | 510 |
| | | PHS | |
| R8 | U | ALYTMMKDQYANYVVQKMIDVAEPGQRKIVMHKIRP | 493 |
| R1 | C | HIMEFSQDQHGSRFIRLKLERATPAERQLVFNEILQ | 499 |
| R2 | G | AAYQLMVDVFGSYVIEKFFEFGSLEQKLALAERIRG | 491 |
| R3 | U | HVLSLALQMYGNRVIQKALEFIPSDQQNEMVRELDG | 506 |
| R4 | C | HVLKCVKDQNGSYVVRKCIECVQPQSLQFIIDAFKG | 505 |
| R5 | G | QVFALSTHPYGSRVIERILEHCLPDQTLPILEELHQ | 513 |
| R6 | U | HTEQLVQDQYGNYVIQHVLEHGRPEDKSKIVAEIRG | 500 |
| R7 | C | NVLVLSQHKFASYVVRKCVTHASRTERAVLIDEVCTMNDG | 511 |
| | | PHS | |
| R8 | G | ALYTMMKDQYASYVVEKMIDVAEPGQRKIVMHKIRP | 489 |
| PUF R8′ | — | HIATLRKYTYGKHILAKLEKYYMKNGVDLG | 496 |

[0649] In some aspects, fusion proteins of the disclosure comprise a PUF according to SEQ ID NOs: 444-451, 461, 480-488, 547-558, 570, or 638-649. In some aspects, fusion proteins of the disclosure comprise a PUF according to SEQ ID NO: 444. In some aspects, fusion proteins of the disclosure comprise, from N-terminus to C-terminus: a human NLS sequence, a PUF according to SEQ ID NO: 444; a linker sequence; and an endonuclease. In some aspects, an exemplary 8PUF targeting CUG fusion protein of the disclosure is arranged from N-terminus to C-terminus according to elements listed in any one of Tables 42-50. In some embodiments, a CUG-targeting fusion protein comprising an 8PUF protein of the disclosure comprises SEQ ID NO: 559. In some embodiments, a CUG-targeting fusion protein comprising an 14PUF protein of the disclosure comprises SEQ ID NO: 560. In some embodiments, a CUG-targeting fusion protein comprising an 14PUF protein of the disclosure comprises SEQ ID NO: 561. In some embodiments, a CUG-targeting fusion protein comprising an 15PUF protein of the disclosure comprises SEQ ID NO: 562. In some embodiments, a CUG-targeting fusion protein comprising an 15PUF protein of the disclosure comprises SEQ ID NO: 563. In some embodiments, a CUG-targeting fusion protein comprising an 15PUF protein of the disclosure comprises SEQ ID NO: 567. In some embodiments, a CUG-targeting fusion protein comprising an 16PUF protein of the disclosure comprises SEQ ID NO: 565. In some embodiments, a CUG-targeting fusion protein comprising an 16PUF protein of the disclosure comprises SEQ ID NO: 566. In some embodiments, a CUG-targeting fusion protein comprising an 16PUF protein of the disclosure comprises SEQ ID NO: 567.

TABLE 42
Exemplary 8PUF targeting CUG Fusion Protein

| Plasmid | RNA | |
|---|---|---|
| Element | Recognition | Amino Acid Sequence |
| SV40 NLS | — | PKKKRKV (SEQ ID NO: 437) |
| 8PUF | UGCUGCUG | GRSRLLEDFRNNRYPNLQLREIAGHIMEFSQDQHGSRFIE |
| | | LKLERATPAERQLVFNEILQAAYQLMVDVFGNYVIQKFF |
| | | EFGSLEQKLALAERIRGHVLSLALQMYGSYVIRKALEFIP |
| | | SDQQNEMVRELDGHVLKCVKDQNGSYVVEKCIECVQP |
| | | QSLQFIIDAFKGQVFALSTHPYGNRVIQRILEHCLPDQTLP |
| | | ILEELHQHTEQLVQDQYGSYVIRHVLEHGRPEDKSKIVA |
| | | EIRGNVLVLSQHKFASNVVEKCVTHASRTERAVLIDEVC |
| | | TMNDGPHSALYTMMKDQYANYVVQKMIDVAEPGQRKI |
| | | VMHKIRPHIATLRKYTYGKHILAKLEKYYMKNGVDLG |
| | | (SEQ ID NO: 444) |
| Linker | — | VDTANGS (SEQ ID NO: 411) |
| E17 | — | GGGTPKAPNLEPPLPEEEKEGSDLRPVVIDGSNVAMSHG |
| endonuclease | | NKEVFSCRGILLAVNWFLERGHTDITVFVPSWRKEQPRP |
| | | DVPITDQHILRELEKKKILVFTPSRRVGGKRVVCYDDRFI |
| | | VKLAYESDGIVVSNDTYRDLQGERQEWKRFIEERLLMYS |
| | | FVNDKFMPPDDPLGRHGPSLDNFLRKKPLTLE (SEQ ID |
| | | NO: 358) |

TABLE 43
Exemplary 14PUF targeting CUG Fusion Protein

| Plasmid | RNA | |
|---|---|---|
| Element | Recognition | Amino Acid Sequence |
| SV40 NLS | — | PKKKRKV (SEQ ID NO: 437) |
| 14PUF | UGCUGCUGCU | GRSRLLEDFRNNRYPNLQLREIAGHIMEFSQDQHGSRFI |
| | GCUG | ELKLERATPAERQLVFNEILQAAYQLMVDVFGNYVIQK |
| | | FFEFGSLEQKLALAERIRGHVLSLALQMYGSYVIRKALE |
| | | FIPSDQQNEMVRELDGHVLKCVKDQNGSYVVEKCIECV |
| | | QPQSLQFIIDAFKGQVFALSTHPYGNRVIQRILEHCLPDQ |
| | | TLPILEELHQHIMEFSQDQHGSRFIRLKLERATPAERQLV |
| | | FNEILQAAYQLMVDVFGSYVIEKFFEFGSLEQKLALAER |
| | | IRGHVLSLALQMYGNRVIQKALEFIPSDQQNEMVRELD |
| | | GHVLKCVKDQNGSYVVRKCIECVQPQSLQFIIDAFKGQ |
| | | VFALSTHPYGSRVIERILEHCLPDQTLPILEELHQHTEQL |
| | | VQDQYGNYVIQHVLEHGRPEDKSKIVAEIRGHTEQLVQ |
| | | DQYGSYVIRHVLEHGRPEDKSKIVAEIRGNVLVLSQHK |
| | | FASNVVEKCVTHASRTERAVLIDEVCTMNDGPHSALYT |
| | | MMKDQYANYVVQKMIDVAEPGQRKIVMHKIRPHIATL |
| | | RKYTYGKHILAKLEKYYMKNGVDLG |
| | | (SEQ ID NO: 445) |
| Linker | — | VDTANGS (SEQ ID NO: 411) |
| E17 | — | GGGTPKAPNLEPPLPEEEKEGSDLRPVVIDGSNVAMSHG |
| endonuclease | | NKEVFSCRGILLAVNWFLERGHTDITVFVPSWRKEQPRP |
| | | DVPITDQHILRELEKKKILVFTPSRRVGGKRVVCYDDRFI |
| | | VKLAYESDGIVVSNDTYRDLQGERQEWKRFIEERLLMYS |
| | | FVNDKFMPPDDPLGRHGPSLDNFLRKKPLTLE (SEQ ID |
| | | NO: 358) |

TABLE 44
Exemplary 14PUF targeting CUG Fusion Protein

| Plasmid | RNA | |
|---|---|---|
| Element | Recognition | Amino Acid Sequence |
| SV40 NLS | — | PKKKRKV (SEQ ID NO: 437) |
| 14PUF | UGCUGCUGCU | GRSRLLEDFRNNRYPNLQLREIAGHIMEFSQDQHGSRFIE |
| | GCUG | LKLERATPAERQLVFNEILQAAYQLMVDVFGNYVIQKFF |
| | | EFGSLEQKLALAERIRGHVLSLALQMYGSYVIRKALEFIP |
| | | SDQQNEMVRELDGHVLKCVKDQNGSYVVEKCIECVQPQ |
| | | SLQFIIDAFKGQVFALSTHPYGNRVIQRILEHCLPDQTLPIL |
| | | EELHQHTEQLVQDQYGSYVIRHVLEHGRPEDKSKIVAEI |
| | | RGHIMEFSQDQHGSRFIELKLERATPAERQLVFNEILQAA |
| | | YQLMVDVFGNYVIQKFFEFGSLEQKLALAERIRGHVLSL |
| | | ALQMYGSYVIRKALEFIPSDQQNEMVRELDGHVLKCVK |
| | | DQNGSYVVEKCIECVQPQSLQFIIDAFKGQVFALSTHPYG |
| | | NRVIQRILEHCLPDQTLPILEELHQHTEQLVQDQYGSYVI |
| | | RHVLEHGRPEDKSKIVAEIRGNVLVLSQHKFASNVVEKC |
| | | VTHASRTERAVLIDEVCTMNDGPHSALYTMMKDQYAN |
| | | YVVQKMIDVAEPGQRKIVMHKIRPHIATLRKYTYGKHIL |
| | | AKLEKYYMKNGVDLG |
| | | (SEQ ID NO: 446) |
| Linker | — | VDTANGS (SEQ ID NO: 411) |
| E17 | — | GGGTPKAPNLEPPLPEEEKEGSDLRPVVIDGSNVAMSHG |
| endonuclease | | NKEVFSCRGILLAVNWFLERGHTDITVFVPSWRKEQPRP |
| | | DVPITDQHILRELEKKKILVFTPSRRVGGKRVVCYDDRFI |
| | | VKLAYESDGIVVSNDTYRDLQGERQEWKRFIEERLLMYS |
| | | FVNDKFMPPDDPLGRHGPSLDNFLRKKPLTLE (SEQ ID |
| | | NO: 358) |

TABLE 45
Exemplary 15PUF targeting CUG Fusion Protein

| Plasmid | RNA | |
|---|---|---|
| Element | Recognition | Amino Acid Sequence |
| SV40 NLS | — | PKKKRKV (SEQ ID NO: 437) |
| 15PUF | UGCUGCUGCU | GRSRLLEDFRNNRYPNLQLREIAGHIMEFSQDQHGSRFIR |
| | GCUGC | LKLERATPAERQLVFNEILQAAYQLMVDVFGSYVIEKFFE |
| | | FGSLEQKLALAERIRGHVLSLALQMYGNRVIQKALEFIPS |
| | | DQQNEMVRELDGHVLKCVKDQNGSYVVRKCIECVQPQS |
| | | LQFIIDAFKGQVFALSTHPYGSRVIERILEHCLPDQTLPILE |
| | | ELHQHIMEFSQDQHGNRFIQLKLERATPAERQLVFNEILQ |
| | | AAYQLMVDVFGSYVIRKFFEFGSLEQKLALAERIRGHVL |
| | | SLALQMYGSRVIEKALEFIPSDQQNEMVRELDGHVLKCV |
| | | KDQNGNHVVQKCIECVQPQSLQFIIDAFKGQVFALSTHP |
| | | YGSRVIRRILEHCLPDQTLPILEELHQHTEQLVQDQYGSY |
| | | VIEHVLEHGRPEDKSKIVAEIRGNVLVLSQHKFANNVVQ |
| | | KCVTHASRTERAVLIDEVCTMNDGPHSHTEQLVQDQYG |
| | | SYVIRHVLEHGRPEDKSKIVAEIRGNVLVLSQHKFASNVV |
| | | EKCVTHASRTERAVLIDEVCTMNDGPHSALYTMMKDQY |
| | | ANYVVQKMIDVAEPGQRKIVMHKIRPHIATLRKYTYGK |
| | | HILAKLEKYYMKNGVDLG |
| | | (SEQ ID NO: 447) |
| Linker | — | VDTANGS (SEQ ID NO: 411) |
| E17 | — | GGGTPKAPNLEPPLPEEEKEGSDLRPVVIDGSNVAMSHG |
| endonuclease | | NKEVFSCRGILLAVNWFLERGHTDITVFVPSWRKEQPRP |
| | | DVPITDQHILRELEKKKILVFTPSRRVGGKRVVCYDDRFI |
| | | VKLAYESDGIVVSNDTYRDLQGERQEWKRFIEERLLMYS |
| | | FVNDKFMPPDDPLGRHGPSLDNFLRKKPLTLE (SEQ ID |
| | | NO: 358) |

TABLE 46
Exemplary 15PUF targeting CUG Fusion Protein

| Plasmid | RNA | |
|---|---|---|
| Element | Recognition | Amino Acid Sequence |
| SV40 NLS | — | PKKKRKV (SEQ ID NO: 437) |
| 15PUF | UGCUGCUGCU | GRSRLLEDFRNNRYPNLQLREIAGHIMEFSQDQHGSRFIR |
| | GCUGC | LKLERATPAERQLVFNEILQAAYQLMVDVFGSYVIEKFF |
| | | EFGSLEQKLALAERIRGHVLSLALQMYGNRVIQKALEFIP |
| | | SDQQNEMVRELDGHVLKCVKDQNGSYVVRKCIECVQP |
| | | QSLQFIIDAFKGQVFALSTHPYGSRVIERILEHCLPDQTLP |
| | | ILEELHQHTEQLVQDQYGNYVIQHVLEHGRPEDKSKIVA |
| | | EIRGHIMEFSQDQHGSRFIRLKLERATPAERQLVFNEILQ |
| | | AAYQLMVDVFGSYVIEKFFEFGSLEQKLALAERIRGHVL |
| | | SLALQMYGNRVIQKALEFIPSDQQNEMVRELDGHVLKC |
| | | VKDQNGSYVVRKCIECVQPQSLQFIIDAFKGQVFALSTH |
| | | PYGSRVIERILEHCLPDQTLPILEELHQHTEQLVQDQYGN |
| | | YVIQHVLEHGRPEDKSKIVAEIRGNVLVLSQHKFASYVV |
| | | RKCVTHASRTERAVLIDEVCTMNDGPHSNVLVLSQHKF |
| | | ASNVVEKCVTHASRTERAVLIDEVCTMNDGPHSALYTM |
| | | MKDQYANYVVQKMIDVAEPGQRKIVMHKIRPHIATLRK |
| | | YTYGKHILAKLEKYYMKNGVDLG |
| | | (SEQ ID NO: 448) |
| Linker | — | VDTANGS (SEQ ID NO: 411) |
| E17 | — | GGGTPKAPNLEPPLPEEEKEGSDLRPVVIDGSNVAMSHG |
| endonuclease | | NKEVFSCRGILLAVNWFLERGHTDITVFVPSWRKEQPRP |
| | | DVPITDQHILRELEKKKILVFTPSRRVGGKRVVCYDDRFI |
| | | VKLAYESDGIVVSNDTYRDLQGERQEWKRFIEERLLMYS |
| | | FVNDKFMPPDDPLGRHGPSLDNFLRKKPLTLE (SEQ ID |
| | | NO: 358) |

TABLE 47
Exemplary 15PUF targeting CUG Fusion Protein

| Plasmid | RNA | |
|---|---|---|
| Element | Recognition | Amino Acid Sequence |
| SV40 NLS | — | PKKKRKV (SEQ ID NO: 437) |
| 15PUF | UGCUGCUGCU | GRSRLLEDFRNNRYPNLQLREIAGHIMEFSQDQHGSRFIR |
| | GCUGC | LKLERATPAERQLVFNEILQAAYQLMVDVFGSYVIEKFF |
| | | EFGSLEQKLALAERIRGHVLSLALQMYGNRVIQKALEFIP |
| | | SDQQNEMVRELDGHVLKCVKDQNGSYVVRKCIECVQP |
| | | QSLQFIIDAFKGQVFALSTHPYGSRVIERILEHCLPDQTLPI |
| | | LEELHQHTEQLVQDQYGNYVIQHVLEHGRPEDKSKIVAE |
| | | IRGNVLVLSQHKFASYVVRKCVTHASRTERAVLIDEVCT |
| | | MNDGPHSHIMEFSQDQHGSRFIELKLERATPAERQLVFN |
| | | EILQAAYQLMVDVFGNYVIQKFFEFGSLEQKLALAERIR |
| | | GHVLSLALQMYGSYVIRKALEFIPSDQQNEMVRELDGH |
| | | VLKCVKDQNGSYVVEKCIECVQPQSLQFIIDAFKGQVFA |
| | | LSTHPYGNRVIQRILEHCLPDQTLPILEELHQHTEQLVQD |
| | | QYGSYVIRHVLEHGRPEDKSKIVAEIRGNVLVLSQHKFA |
| | | SNVVEKCVTHASRTERAVLIDEVCTMNDGPHSALYTMM |
| | | KDQYANYVVQKMIDVAEPGQRKIVMHKIRPHIATLRKY |
| | | TYGKHILAKLEKYYMKNGVDLG |
| | | (SEQ ID NO: 461) |
| Linker | — | VDTANGS (SEQ ID NO: 411) |
| E17 | — | GGGTPKAPNLEPPLPEEEKEGSDLRPVVIDGSNVAMSHG |
| endonuclease | | NKEVFSCRGILLAVNWFLERGHTDITVFVPSWRKEQPRP |
| | | DVPITDQHILRELEKKKILVFTPSRRVGGKRVVCYDDRFI |
| | | VKLAYESDGIVVSNDTYRDLQGERQEWKRFIEERLLMYS |
| | | FVNDKFMPPDDPLGRHGPSLDNFLRKKPLTLE (SEQ ID |
| | | NO: 358) |

TABLE 48
Exemplary 16PUF targeting CUG Fusion Protein

| Plasmid | RNA | |
|---|---|---|
| Element | Recognition | PUF Amino Acid Sequence |
| SV40 NLS | — | PKKKRKV (SEQ ID NO: 437) |
| 16PUF | UGCUGCUGCU | GRSRLLEDFRNNRYPNLQLREIAGHIMEFSQDQHGNRFIQ |
| | GCUGCU (SEQ | LKLERATPAERQLVFNEILQAAYQLMVDVFGSYVIRKFFE |
| | ID NO: 456) | FGSLEQKLALAERIRGHVLSLALQMYGSRVIEKALEFIPSD |
| | | QQNEMVRELDGHVLKCVKDQNGNHVVQKCIECVQPQSL |
| | | QFIIDAFKGQVFALSTHPYGSRVIRRILEHCLPDQTLPILEE |
| | | LHQHIMEFSQDQHGSRFIELKLERATPAERQLVFNEILQA |
| | | AYQLMVDVFGNYVIQKFFEFGSLEQKLALAERIRGHVLS |
| | | LALQMYGSYVIRKALEFIPSDQQNEMVRELDGHVLKCVK |
| | | DQNGSYVVEKCIECVQPQSLQFIIDAFKGQVFALSTHPYG |
| | | NRVIQRILEHCLPDQTLPILEELHQHTEQLVQDQYGSYVIR |
| | | HVLEHGRPEDKSKIVAEIRGNVLVLSQHKFASNVVEKCV |
| | | THASRTERAVLIDEVCTMNDGPHSALYTMMKDQYANYV |
| | | VQKMIDVAEPGQRKIVMHKIRPHTEQLVQDQYGSYVIRH |
| | | VLEHGRPEDKSKIVAEIRGNVLVLSQHKFASNVVEKCVT |
| | | HASRTERAVLIDEVCTMNDGPHSALYTMMKDQYANYVV |
| | | QKMIDVAEPGQRKIVMHKIRPHIATLRKYTYGKHILAKLE |
| | | KYYMKNGVDLG |
| | | (SEQ ID NO: 449) |
| Linker | — | VDTANGS (SEQ ID NO: 411) |
| E17 | — | GGGTPKAPNLEPPLPEEEKEGSDLRPVVIDGSNVAMSHG |
| endonuclease | | NKEVFSCRGILLAVNWFLERGHTDITVFVPSWRKEQPRP |
| | | DVPITDQHILRELEKKKILVFTPSRRVGGKRVVCYDDRFI |
| | | VKLAYESDGIVVSNDTYRDLQGERQEWKRFIEERLLMYS |
| | | FVNDKFMPPDDPLGRHGPSLDNFLRKKPLTLE (SEQ ID |
| | | NO: 358) |

TABLE 49
Exemplary 16PUF targeting CUG Fusion Protein

| Plasmid | RNA | |
|---|---|---|
| Element | Recognition | Amino Acid Sequence |
| SV40 NLS | — | PKKKRKV (SEQ ID NO: 437) |
| 16PUF | UGCUGCUGCU | GRSRLLEDFRNNRYPNLQLREIAGHIMEFSQDQHGNRFI |
| | GCUGCU (SEQ | QLKLERATPAERQLVFNEILQAAYQLMVDVFGSYVIRKF |
| | ID NO: 456) | FEFGSLEQKLALAERIRGHVLSLALQMYGSRVIEKALEFI |
| | | PSDQQNEMVRELDGHVLKCVKDQNGNHVVQKCIECVQ |
| | | PQSLQFIIDAFKGQVFALSTHPYGSRVIRRILEHCLPDQTL |
| | | PILEELHQHTEQLVQDQYGSYVIEHVLEHGRPEDKSKIV |
| | | AEIRGHIMEFSQDQHGNRFIQLKLERATPAERQLVFNEIL |
| | | QAAYQLMVDVFGSYVIRKFFEFGSLEQKLALAERIRGHV |
| | | LSLALQMYGSRVIEKALEFIPSDQQNEMVRELDGHVLKC |
| | | VKDQNGNHVVQKCIECVQPQSLQFIIDAFKGQVFALSTH |
| | | PYGSRVIRRILEHCLPDQTLPILEELHQHTEQLVQDQYGS |
| | | YVIEHVLEHGRPEDKSKIVAEIRGNVLVLSQHKFANNVV |
| | | QKCVTHASRTERAVLIDEVCTMNDGPHSALYTMMKDQ |
| | | YASYVVRKMIDVAEPGQRKIVMHKIRPNVLVLSQHKFA |
| | | SNVVEKCVTHASRTERAVLIDEVCTMNDGPHSALYTMM |
| | | KDQYANYVVQKMIDVAEPGQRKIVMHKIRPHIATLRKY |
| | | TYGKHILAKLEKYYMKNGVDLG |
| | | (SEQ ID NO: 450) |
| Linker | — | VDTANGS (SEQ ID NO: 411) |
| E17 | — | GGGTPKAPNLEPPLPEEEKEGSDLRPVVIDGSNVAMSHG |
| endonuclease | | NKEVFSCRGILLAVNWFLERGHTDITVFVPSWRKEQPRP |
| | | DVPITDQHILRELEKKKILVFTPSRRVGGKRVVCYDDRFI |
| | | VKLAYESDGIVVSNDTYRDLQGERQEWKRFIEERLLMYS |
| | | FVNDKFMPPDDPLGRHGPSLDNFLRKKPLTLE (SEQ ID |
| | | NO: 358) |

| Plasmid | RNA | |
|---|---|---|
| Element | Recognition | Amino Acid Sequence |
| SV40 NLS | — | PKKKRKV (SEQ ID NO: 437) |
| 16PUF | UGCUGCUGCU | GRSRLLEDFRNNRYPNLQLREIAGHIMEFSQDQHGNRFIQ |
| | GCUGCU (SEQ | LKLERATPAERQLVFNEILQAAYQLMVDVFGSYVIRKFF |
| | ID NO: 456) | EFGSLEQKLALAERIRGHVLSLALQMYGSRVIEKALEFIP |
| | | SDQQNEMVRELDGHVLKCVKDQNGNHVVQKCIECVQP |
| | | QSLQFIIDAFKGQVFALSTHPYGSRVIRRILEHCLPDQTLPI |
| | | LEELHQHTEQLVQDQYGSYVIEHVLEHGRPEDKSKIVAEI |
| | | RGNVLVLSQHKFANNVVQKCVTHASRTERAVLIDEVCT |
| | | MNDGPHSALYTMMKDQYASYVVRKMIDVAEPGQRKIV |
| | | MHKIRPHIMEFSQDQHGSRFIELKLERATPAERQLVFNEI |
| | | LQAAYQLMVDVFGNYVIQKFFEFGSLEQKLALAERIRGH |
| | | VLSLALQMYGSYVIRKALEFIPSDQQNEMVRELDGHVLK |
| | | CVKDQNGSYVVEKCIECVQPQSLQFIIDAFKGQVFALSTH |
| | | PYGNRVIQRILEHCLPDQTLPILEELHQHTEQLVQDQYGS |
| | | YVIRHVLEHGRPEDKSKIVAEIRGNVLVLSQHKFASNVV |
| | | EKCVTHASRTERAVLIDEVCTMNDGPHSALYTMMKDQY |
| | | ANYVVQKMIDVAEPGQRKIVMHKIRPHIATLRKYTYGK |
| | | HILAKLEKYYMKNGVDLG |
| | | (SEQ ID NO: 451) |
| Linker | — | VDTANGS (SEQ ID NO: 411) |
| E17 | — | GGGTPKAPNLEPPLPEEEKEGSDLRPVVIDGSNVAMSHG |
| endonuclease | | NKEVFSCRGILLAVNWFLERGHTDITVFVPSWRKEQPRP |
| | | DVPITDQHILRELEKKKILVFTPSRRVGGKRVVCYDDRFI |
| | | VKLAYESDGIVVSNDTYRDLQGERQEWKRFIEERLLMYS |
| | | FVNDKFMPPDDPLGRHGPSLDNFLRKKPLTLE (SEQ ID |
| | | NO: 358) |

[0650] Additional PUF(CUG) RNA-targeting compositions are as follows:

16PUFN5 targeting CUGf3 DM1 w/or w/o Endonuclease

| | Protein | | Target | |
|---|---|---|---|---|
| Construct | Type | Elements | Sequence | Amino Acid Sequence |
| n/a | 16PUFN5 | N- | UGCUGC | GRSRLLEDFRNNRYPNLQLREIAGHIME |
| | | terminal | UGCUGC | FSQDQHGNYFIQLKLERATPAERQLVFN |
| | | Rb NLS, | UGCU | EILQAAYQLMVDVFGSYVIRKFFEFGSL |
| | | Linker | (SEQ ID | EQKLALAERIRGHVLSLALQMYGSNVIE |
| | | between | NO: 456) | KALEFIPSDQQNEMVRELDGHVLKCVK |
| | | NLS and | | DQNGNHVVQKCIECVQPQSLQFIIDAFK |
| | | 16PUF, C- | | GQVFALSTHPYGSYVIRRILEHCLPDQTL |
| | | terminal | | PILEELHQHIMEFSQDQHGSNFIELKLER |
| | | E17 with | | ATPAERQLVFNEILQAAYQLMVDVFGN |
| | | linker | | YVIQKFFEFGSLEQKLALAERIRGHVLSL |
| | | between | | ALQMYGSYVIRKALEFIPSDQQNEMVRE |
| | | 16PUF | | LDGHVLKCVKDQNGSNVVEKCIECVQP |
| | | and E17 | | QSLQFIIDAFKGQVFALSTHPYGNYVIQR |
| | | | | ILEHCLPDQTLPILEELHQHTEQLVQDQY |
| | | | | GSYVIRHVLEHGRPEDKSKIVAEIRGNVL |
| | | | | VLSQHKFASNVVEKCVTHASRTERAVLI |
| | | | | DEVCTMNDGPHSALYTMMKDQYANYV |
| | | | | VQKMIDVAEPGQRKIVMHKIRPHTEQLV |
| | | | | QDQYGSYVIRHVLEHGRPEDKSKIVAEI |
| | | | | RGNVLVLSQHKFASNVVEKCVTHASRT |
| | | | | ERAVLIDEVCTMNDGPHSALYTMMKDQ |
| | | | | YANYVVQKMIDVAEPGQRKIVMHKIRP |
| | | | | HIATLRKYTYGKHILAKLEKYYMKNGV |
| | | | | DLG (SEQ ID NO: 638) |

TABLE T
16PUF targeting CUG Fusion Protein (Blocking or *cleaving)

| Plasmid | |
|---|---|
| Element | Amino Acid Sequences |
| Rb-NLS | DRVLKRSAEGSNPPKPLKKLR (SEQ ID NO: 543) |
| Linker | GGS |
| 16PUFN5 | GRSRLLEDFRNNRYPNLQLREIAGHIMEFSQDQHGNYFIQLKLERATPAERQL |
| | VFNEILQAAYQLMVDVFGSYVIRKFFEFGSLEQKLALAERIRGHVLSLALQM |
| | YGSNVIEKALEFIPSDQQNEMVRELDGHVLKCVKDQNGNHVVQKCIECVQP |
| | QSLQFIIDAFKGQVFALSTHPYGSYVIRRILEHCLPDQTLPILEELHQHIMEFSQ |
| | DQHGSNFIELKLERATPAERQLVFNEILQAAYQLMVDVFGNYVIQKFFEFGSL |
| | EQKLALAERIRGHVLSLALQMYGSYVIRKALEFIPSDQQNEMVRELDGHVLK |
| | CVKDQNGSNVVEKCIECVQPQSLQFIIDAFKGQVFALSTHPYGNYVIQRILEH |
| | CLPDQTLPILEELHQHTEQLVQDQYGSYVIRHVLEHGRPEDKSKIVAEIRGNV |
| | LVLSQHKFASNVVEKCVTHASRTERAVLIDEVCTMNDGPHSALYTMMKDQY |
| | ANYVVQKMIDVAEPGQRKIVMHKIRPHTEQLVQDQYGSYVIRHVLEHGRPE |
| | DKSKIVAEIRGNVLVLSQHKFASNVVEKCVTHASRTERAVLIDEVCTMNDGP |
| | HSALYTMMKDQYANYVVQKMIDVAEPGQRKIVMHKIRPHIATLRKYTYGK |
| | HILAKLEKYYMKNGVDLG (SEQ ID NO: 638) |

(*with endonuclease e.g., E17 and linker, e.g., VDTANGS between 16 PUF and E17 for cleaving)

16PUFN6 Targeting CUGf3 (DM1) w/or w/o Endonuclease

| | Protein | | Target | |
|---|---|---|---|---|
| Construct | Type | Elements | Sequence | PUF Amino Acid Sequence |
| n/a | 16PUFN6 | N- | UGCUGC | GRSRLLEDFRNNRYPNLQLREIAGHIME |
| | | terminal | UGCUGC | FSQDQHGNYFIQLKLERATPAERQLVFN |
| | | Rb NLS, | UGCU | EILQAAYQLMVDVFGSYVIRKFFEFGSL |
| | | Linker | | EQKLALAERIRGHVLSLALQMYGSNVIE |
| | | between | | KALEFIPSDQQNEMVRELDGHVLKCVK |
| | | NLS and | | DQNGNHVVQKCIECVQPQSLQFIIDAFK |
| | | 16PUF, C- | | GQVFALSTHPYGSYVIRRILEHCLPDQTL |
| | | terminal | | PILEELHQHTEQLVQDQYGSNVIEHVLE |
| | | E17 with | | HGRPEDKSKIVAEIRGHIMEFSQDQHGN |
| | | linker | | YFIQLKLERATPAERQLVFNEILQAAYQL |
| | | between | | MVDVFGSYVIRKFFEFGSLEQKLALAERI |
| | | 16PUF | | RGHVLSLALQMYGSNVIEKALEFIPSDQ |
| | | and E17 | | QNEMVRELDGHVLKCVKDQNGNHVVQ |
| | | | | KCIECVQPQSLQFIIDAFKGQVFALSTHP |
| | | | | YGSYVIRRILEHCLPDQTLPILEELHQHT |
| | | | | EQLVQDQYGSNVIEHVLEHGRPEDKSKI |
| | | | | VAEIRGNVLVLSQHKFANYVVQKCVTH |
| | | | | ASRTERAVLIDEVCTMNDGPHSALYTM |
| | | | | MKDQYASYVVRKMIDVAEPGQRKIVM |
| | | | | HKIRPNVLVLSQHKFASNVVEKCVTHAS |
| | | | | RTERAVLIDEVCTMNDGPHSALYTMMK |
| | | | | DQYANYVVQKMIDVAEPGQRKIVMHKI |
| | | | | RPHIATLRKYTYGKHILAKLEKYYMKN |
| | | | | GVDLG (SEQ ID NO: 650) |

### Amino Acid Sequences of Transgene Elements in Order N-Terminal to C-Terminal (Blocking or *Cleaving)

| Plasmid | |
|---|---|
| Element | Amino Acid Sequences |
| Rb-NLS | DRVLKRSAEGSNPPKPLKKLR (SEQ ID NO: 543) |
| Linker | GGS |
| 16PUFN6 | GRSRLLEDFRNNRYPNLQLREIAGHIMEFSQDQHGNYFIQLKLERATPAERQL |
| | VFNEILQAAYQLMVDVFGSYVIRKFFEFGSLEQKLALAERIRGHVLSLALQM |
| | YGSNVIEKALEFIPSDQQNEMVRELDGHVLKCVKDQNGNHVVQKCIECVQP |
| | QSLQFIIDAFKGQVFALSTHPYGSYVIRRILEHCLPDQTLPILEELHQHTEQLVQ |
| | DQYGSNVIEHVLEHGRPEDKSKIVAEIRGHIMEFSQDQHGNYFIQLKLERATP |
| | AERQLVFNEILQAAYQLMVDVFGSYVIRKFFEFGSLEQKLALAERIRGHVLSL |
| | ALQMYGSNVIEKALEFIPSDQQNEMVRELDGHVLKCVKDQNGNHVVQKCIE |
| | CVQPQSLQFIIDAFKGQVFALSTHPYGSYVIRRILEHCLPDQTLPILEELHQHTE |
| | QLVQDQYGSNVIEHVLEHGRPEDKSKIVAEIRGNVLVLSQHKFANYVVQKCV |
| | THASRTERAVLIDEVCTMNDGPHSALYTMMKDQYASYVVRKMIDVAEPGQ |
| | RKIVMHKIRPNVLVLSQHKFASNVVEKCVTHASRTERAVLIDEVCTMNDGPH |
| | SALYTMMKDQYANYVVQKMIDVAEPGQRKIVMHKIRPHIATLRKYTYGKHI |
| | LAKLEKYYMKNGVDLG (SEQ ID NO: 650) |

(*with endonuclease e.g., E17 and linker, e.g., VDTANGS between 16 PUF and E17 for cleaving)

16PUFN0 Targeting CUGf3 DM1 w/or w/o Endonuclease

| | Protein | | Target | |
|---|---|---|---|---|
| Construct | Type | Elements | Sequence | PUF Amino Acid Sequence |
| n/a | 16PUFN0 | N- | UGCUGC | GRSRLLEDFRNNRYPNLQLREIAGHIME |
| | | terminal | UGCUGC | FSQDQHGNYFIQLKLERATPAERQLVFN |
| | | Rb NLS, | UGCU | EILQAAYQLMVDVFGSYVIRKFFEFGSL |
| | | Linker | (SEQ ID | EQKLALAERIRGHVLSLALQMYGSNVIE |
| | | between | NO: 456) | KALEFIPSDQQNEMVRELDGHVLKCVK |
| | | NLS and | | DQNGNHVVQKCIECVQPQSLQFIIDAFK |
| | | 16PUF, C- | | GQVFALSTHPYGSYVIRRILEHCLPDQTL |
| | | terminal | | PILEELHQHTEQLVQDQYGSNVIEHVLE |
| | | E17 with | | HGRPEDKSKIVAEIRGNVLVLSQHKFAN |
| | | linker | | YVVQKCVTHASRTERAVLIDEVCTMND |
| | | between | | GPHSALYTMMKDQYASYVVRKMIDVA |
| | | 16PUF | | EPGQRKIVMHKIRPHIMEFSQDQHGSNFI |
| | | and E17 | | ELKLERATPAERQLVFNEILQAAYQLMV |
| | | | | DVFGNYVIQKFFEFGSLEQKLALAERIRG |
| | | | | HVLSLALQMYGSYVIRKALEFIPSDQQN |
| | | | | EMVRELDGHVLKCVKDQNGSNVVEKCI |
| | | | | ECVQPQSLQFIIDAFKGQVFALSTHPYGN |
| | | | | YVIQRILEHCLPDQTLPILEELHQHTEQL |
| | | | | VQDQYGSYVIRHVLEHGRPEDKSKIVAE |
| | | | | IRGNVLVLSQHKFASNVVEKCVTHASRT |
| | | | | ERAVLIDEVCTMNDGPHSALYTMMKDQ |
| | | | | YANYVVQKMIDVAEPGQRKIVMHKIRP |
| | | | | HIATLRKYTYGKHILAKLEKYYMKNGV |
| | | | | DLG (SEQ ID NO: 639) |

### Amino Acid Sequences of Transgene Elements in Order N-Terminal to C-Terminal (Blocking or *Cleaving)

| Plasmid | |
|---|---|
| Element | Amino Acid Sequences |
| Rb-NLS | DRVLKRSAEGSNPPKPLKKLR (SEQ ID NO: 543) |
| Linker | GGS |
| 16PUFN0 | GRSRLLEDFRNNRYPNLQLREIAGHIMEFSQDQHGNYFIQLKLERATPAERQL |
| | VFNEILQAAYQLMVDVFGSYVIRKFFEFGSLEQKLALAERIRGHVLSLALQM |
| | YGSNVIEKALEFIPSDQQNEMVRELDGHVLKCVKDQNGNHVVQKCIECVQP |
| | QSLQFIIDAFKGQVFALSTHPYGSYVIRRILEHCLPDQTLPILEELHQHTEQLVQ |
| | DQYGSNVIEHVLEHGRPEDKSKIVAEIRGNVLVLSQHKFANYVVQKCVTHAS |
| | RTERAVLIDEVCTMNDGPHSALYTMMKDQYASYVVRKMIDVAEPGQRKIV |
| | MHKIRPHIMEFSQDQHGSNFIELKLERATPAERQLVFNEILQAAYQLMVDVFG |
| | NYVIQKFFEFGSLEQKLALAERIRGHVLSLALQMYGSYVIRKALEFIPSDQQN |
| | EMVRELDGHVLKCVKDQNGSNVVEKCIECVQPQSLQFIIDAFKGQVFALSTH |
| | PYGNYVIQRILEHCLPDQTLPILEELHQHTEQLVQDQYGSYVIRHVLEHGRPE |
| | DKSKIVAEIRGNVLVLSQHKFASNVVEKCVTHASRTERAVLIDEVCTMNDGP |
| | HSALYTMMKDQYANYVVQKMIDVAEPGQRKIVMHKIRPHIATLRKYTYGK |
| | HILAKLEKYYMKNGVDLG (SEQ ID NO: 639) |
| *Linker | VDTANGS (SEQ ID NO: 411) |
| *Endonuclease | GGGTPKAPNLEPPLPEEEKEGSDLRPVVIDGSNVAMSHGNKEVFSCRGILLAV |
| | NWFLERGHTDITVFVPSWRKEQPRPDVPITDQHILRELEKKKILVFTPSRRVGG |
| | KRVVCYDDRFIVKLAYESDGIVVSNDTYRDLQGERQEWKRFIEERLLMYSFV |
| | NDKFMPPDDPLGRHGPSLDNFLRKKPLTLE (SEQ ID NO: 358) |

8PUF Targeting CUGf3 (DM1) w/Stacking Mutations to C w/or w/o Endonuclease

| | Protein | | Target | |
|---|---|---|---|---|
| Construct | Type | Elements | Sequence | PUF Amino Acid Sequence |
| A02139 | 8PUF | N- | UGCUGCUG | GRSRLLEDFRNNRYPNLQLREIAG |
| | | terminal | (SEQ ID NO: | HIMEFSQDQHGSRFIELKLERATP |
| | | Rb NLS, | 453) | AERQLVFNEILQAAYQLMVDVFG |
| | | Linker | | NYVIQKFFEFGSLEQKLALAERIR |
| | | between | | GHVLSLALQMYGSRVIRKALEFIP |
| | | NLS and | | SDQQNEMVRELDGHVLKCVKDQ |
| | | 8PUF, C- | | NGSHVVEKCIECVQPQSLQFIIDAF |
| | | terminal | | KGQVFALSTHPYGNRVIQRILEHC |
| | | E17 with | | LPDQTLPILEELHQHTEQLVQDQY |
| | | linker | | GSYVIRHVLEHGRPEDKSKIVAEI |
| | | between | | RGNVLVLSQHKFASNVVEKCVTH |
| | | 8PUF and | | ASRTERAVLIDEVCTMNDGPHSA |
| | | E17 | | LYTMMKDQYANYVVQKMIDVAE |
| | | | | PGQRKIVMHKIRPHIATLRKYTYG |
| | | | | KHILAKLEKYYMKNGVDLG (SEQ |
| | | | | ID NO: 640) |

### Amino Acid Sequences of Transgene Elements in Order N-Terminal to C-Terminal (Blocking or * Cleaving)

| Plasmid | |
|---|---|
| Element | Amino Acid Sequences |
| Rb-NLS | DRVLKRSAEGSNPPKPLKKLR (SEQ ID NO: 543) |
| Linker | GGS |
| 8PUF | GRSRLLEDFRNNRYPNLQLREIAGHIMEFSQDQHGSRFIELKLERATPAERQL |
| | VFNEILQAAYQLMVDVFGNYVIQKFFEFGSLEQKLALAERIRGHVLSLALQM |
| | YGSRVIRKALEFIPSDQQNEMVRELDGHVLKCVKDQNGSHVVEKCIECVQPQ |
| | SLQFIIDAFKGQVFALSTHPYGNRVIQRILEHCLPDQTLPILEELHQHTEQLVQ |
| | DQYGSYVIRHVLEHGRPEDKSKIVAEIRGNVLVLSQHKFASNVVEKCVTHAS |
| | RTERAVLIDEVCTMNDGPHSALYTMMKDQYANYVVQKMIDVAEPGQRKIV |
| | MHKIRPHIATLRKYTYGKHILAKLEKYYMKNGVDLG (SEQ ID NO: 640) |
| *Linker | VDTANGS (SEQ ID NO: 411) |
| *Endonuclease | GGGTPKAPNLEPPLPEEEKEGSDLRPVVIDGSNVAMSHGNKEVFSCRGILLAV |
| | NWFLERGHTDITVFVPSWRKEQPRPDVPITDQHILRELEKKKILVFTPSRRVGG |
| | KRVVCYDDRFIVKLAYESDGIVVSNDTYRDLQGERQEWKRFIEERLLMYSFV |
| | NDKFMPPDDPLGRHGPSLDNFLRKKPLTLE (SEQ ID NO: 358) |

### 8PUF Targeting CUGf3 (DM1) w Stacking Mutations to C w/ or w/o Endonuclease

| | Protein | | Target | |
|---|---|---|---|---|
| Construct | Type | Elements | Sequence | PUF Amino Acid Sequence |
| A02140 | 8PUF | N- | UGCUGCUG | GRSRLLEDFRNNRYPNLQLREIAG |
| | | terminal | (SEQ ID NO: | HIMEFSQDQHGSRFIELKLERATP |
| | | Rb NLS, | 453) | AERQLVFNEILQAAYQLMVDVFG |
| | | Linker | | NYVIQKFFEFGSLEQKLALAERIR |
| | | between | | GHVLSLALQMYGSRVIRKALEFIP |
| | | NLS and | | SDQQNEMVRELDGHVLKCVKDQ |
| | | 8PUF, C- | | NGSYVVEKCIECVQPQSLQFIIDAF |
| | | terminal | | KGQVFALSTHPYGNRVIQRILEHC |
| | | E17 with | | LPDQTLPILEELHQHTEQLVQDQY |
| | | linker | | GSYVIRHVLEHGRPEDKSKIVAEI |
| | | between | | RGNVLVLSQHKFASNVVEKCVTH |
| | | 8PUF and | | ASRTERAVLIDEVCTMNDGPHSA |
| | | E17 | | LYTMMKDQYANYVVQKMIDVAE |
| | | | | PGQRKIVMHKIRPHIATLRKYTYG |
| | | | | KHILAKLEKYYMKNGVDLG (SEQ |
| | | | | ID NO: 641) |

### Amino Acid Sequences of Transgene Elements in Order N-Terminal to C-Terminal (Blocking or *Cleaving)

| Plasmid | |
|---|---|
| Element | Amino Acid Sequences |
| Rb-NLS | DRVLKRSAEGSNPPKPLKKLR (SEQ ID NO: 543) |
| Linker | GGS |
| 8PUF | GRSRLLEDFRNNRYPNLQLREIAGHIMEFSQDQHGSRFIELKLERATPAERQL |
| | VFNEILQAAYQLMVDVFGNYVIQKFFEFGSLEQKLALAERIRGHVLSLALQM |
| | YGSRVIRKALEFIPSDQQNEMVRELDGHVLKCVKDQNGSYVVEKCIECVQPQ |
| | SLQFIIDAFKGQVFALSTHPYGNRVIQRILEHCLPDQTLPILEELHQHTEQLVQ |
| | DQYGSYVIRHVLEHGRPEDKSKIVAEIRGNVLVLSQHKFASNVVEKCVTHAS |
| | RTERAVLIDEVCTMNDGPHSALYTMMKDQYANYVVQKMIDVAEPGQRKIV |
| | MHKIRPHIATLRKYTYGKHILAKLEKYYMKNGVDLG (SEQ ID NO: 641) |
| *Linker | VDTANGS (SEQ ID NO: 411) |
| *Endonuclease | GGGTPKAPNLEPPLPEEEKEGSDLRPVVIDGSNVAMSHGNKEVFSCRGILLAV |
| | NWFLERGHTDITVFVPSWRKEQPRPDVPITDQHILRELEKKKILVFTPSRRVGG |
| | KRVVCYDDRFIVKLAYESDGIVVSNDTYRDLQGERQEWKRFIEERLLMYSFV |
| | NDKFMPPDDPLGRHGPSLDNFLRKKPLTLE (SEQ ID NO: 358) |

### 8PUF Targeting CUGf3 (DM1 w/ Stacking Mutations to C w/ or w/o Endonuclease

| | Protein | | Target | |
|---|---|---|---|---|
| Construct | Type | Elements | Sequence | PUF Amino Acid Sequence |
| A02141 | 8PUF | N- | UGCUGCUG | GRSRLLEDFRNNRYPNLQLREIAG |
| | | terminal | (SEQ ID NO: | HIMEFSQDQHGSRFIELKLERATP |
| | | Rb NLS, | | AERQLVFNEILQAAYQLMVDVFG |
| | | 453) | | NYVIQKFFEFGSLEQKLALAERIR |
| | | Linker | | GHVLSLALQMYGSRVIRKALEFIP |
| | | between | | SDQQNEMVRELDGHVLKCVKDQ |
| | | NLS and | | NGSNVVEKCIECVQPQSLQFIIDAF |
| | | 8PUF, C- | | KGQVFALSTHPYGNRVIQRILEHC |
| | | terminal | | LPDQTLPILEELHQHTEQLVQDQY |
| | | E17 with | | GSYVIRHVLEHGRPEDKSKIVAEI |
| | | linker | | RGNVLVLSQHKFASNVVEKCVTH |
| | | between | | ASRTERAVLIDEVCTMNDGPHSA |
| | | 8PUF and | | LYTMMKDQYANYVVQKMIDVAE |
| | | E17 | | PGQRKIVMHKIRPHIATLRKYTYG |
| | | | | KHILAKLEKYYMKNGVDLG (SEQ |
| | | | | ID NO: 642) |

### Amino Acid Sequences of Transgene Elements in Order N-Terminal to C-Terminal (Blocking or *Cleaving)

| Plasmid | |
|---|---|
| Element | Amino Acid Sequences |
| Rb-NLS | DRVLKRSAEGSNPPKPLKKLR (SEQ ID NO: 543) |
| Linker | GGS |
| 8PUF | GRSRLLEDFRNNRYPNLQLREIAGHIMEFSQDQHGSRFIELKLERATPAERQL |
| | VFNEILQAAYQLMVDVFGNYVIQKFFEFGSLEQKLALAERIRGHVLSLALQM |
| | YGSRVIRKALEFIPSDQQNEMVRELDGHVLKCVKDQNGSNVVEKCIECVQPQ |
| | SLQFIIDAFKGQVFALSTHPYGNRVIQRILEHCLPDQTLPILEELHQHTEQLVQ |
| | DQYGSYVIRHVLEHGRPEDKSKIVAEIRGNVLVLSQHKFASNVVEKCVTHAS |
| | RTERAVLIDEVCTMNDGPHSALYTMMKDQYANYVVQKMIDVAEPGQRKIV |
| | MHKIRPHIATLRKYTYGKHILAKLEKYYMKNGVDLG (SEQ ID NO: 642) |
| *Linker | VDTANGS (SEQ ID NO: 411) |
| *Endonuclease | GGGTPKAPNLEPPLPEEEKEGSDLRPVVIDGSNVAMSHGNKEVFSCRGILLAV |
| | NWFLERGHTDITVFVPSWRKEQPRPDVPITDQHILRELEKKKILVFTPSRRVGG |
| | KRVVCYDDRFIVKLAYESDGIVVSNDTYRDLQGERQEWKRFIEERLLMYSFV |
| | NDKFMPPDDPLGRHGPSLDNFLRKKPLTLE (SEQ ID NO: 358) |

8PUF Targeting CUGf3 (DM1) w/Stacking Mutations to C w/or w/o Endonuclease

| | Protein | | Target | |
|---|---|---|---|---|
| Construct | Type | Elements | Sequence | PUF Amino Acid Sequence |
| A02142 | 8PUF | N- | UGCUGCUG | GRSRLLEDFRNNRYPNLQLREIAG |
| | | terminal | (SEQ ID NO: | HIMEFSQDQHGSRFIELKLERATP |
| | | Rb NLS, | 453) | AERQLVFNEILQAAYQLMVDVFG |
| | | Linker | | NYVIQKFFEFGSLEQKLALAERIR |
| | | between | | GHVLSLALQMYGSFVIRKALEFIP |
| | | NLS and | | SDQQNEMVRELDGHVLKCVKDQ |
| | | 8PUF, C- | | NGSFVVEKCIECVQPQSLQFIIDAF |
| | | terminal | | KGQVFALSTHPYGNRVIQRILEHC |
| | | E17 with | | LPDQTLPILEELHQHTEQLVQDQY |
| | | linker | | GSYVIRHVLEHGRPEDKSKIVAEI |
| | | between | | RGNVLVLSQHKFASNVVEKCVTH |
| | | 8PUF and | | ASRTERAVLIDEVCTMNDGPHSA |
| | | E17 | | LYTMMKDQYANYVVQKMIDVAE |
| | | | | PGQRKIVMHKIRPHIATLRKYTYG |
| | | | | KHILAKLEKYYMKNGVDLG (SEQ |
| | | | | ID NO: 643) |

### Amino Acid Sequences of Transgene Elements in Order N-Terminal to C-Terminal (Blocking or *Cleaving)

| Plasmid | |
|---|---|
| Element | Amino Acid Sequences |
| Rb-NLS | DRVLKRSAEGSNPPKPLKKLR (SEQ ID NO: 543) |
| Linker | GGS |
| 8PUF | GRSRLLEDFRNNRYPNLQLREIAGHIMEFSQDQHGSRFIELKLERATPAERQL |
| | VFNEILQAAYQLMVDVFGNYVIQKFFEFGSLEQKLALAERIRGHVLSLALQM |
| | YGSFVIRKALEFIPSDQQNEMVRELDGHVLKCVKDQNGSFVVEKCIECVQPQ |
| | SLQFIIDAFKGQVFALSTHPYGNRVIQRILEHCLPDQTLPILEELHQHTEQLVQ |
| | DQYGSYVIRHVLEHGRPEDKSKIVAEIRGNVLVLSQHKFASNVVEKCVTHAS |
| | RTERAVLIDEVCTMNDGPHSALYTMMKDQYANYVVQKMIDVAEPGQRKIV |
| | MHKIRPHIATLRKYTYGKHILAKLEKYYMKNGVDLG (SEQ ID NO: 643) |
| *Linker | VDTANGS (SEQ ID NO: 411) |
| *Endonuclease | GGGTPKAPNLEPPLPEEEKEGSDLRPVVIDGSNVAMSHGNKEVFSCRGILLAV |
| | NWFLERGHTDITVFVPSWRKEQPRPDVPITDQHILRELEKKKILVFTPSRRVGG |
| | KRVVCYDDRFIVKLAYESDGIVVSNDTYRDLQGERQEWKRFIEERLLMYSFV |
| | NDKFMPPDDPLGRHGPSLDNFLRKKPLTLE (SEQ ID NO: 358) |

8PUF Targeting CUGf3 (DM1) w/Stacking Mutations to C w/or w/o Endonuclease

| | Protein | | Target | |
|---|---|---|---|---|
| Construct | Type | Elements | Sequence | PUF Amino Acid Sequence |
| A02143 | 8PUF | N- | UGCUGCUG | GRSRLLEDFRNNRYPNLQLREIAG |
| | | terminal | (SEQ ID NO: | HIMEFSQDQHGSRFIELKLERATP |
| | | Rb NLS, | 453) | AERQLVFNEILQAAYQLMVDVFG |
| | | Linker | | NYVIQKFFEFGSLEQKLALAERIR |
| | | between | | GHVLSLALQMYGSFVIRKALEFIP |
| | | NLS and | | SDQQNEMVRELDGHVLKCVKDQ |
| | | 8PUF, C- | | NGSYVVEKCIECVQPQSLQFIIDAF |
| | | terminal | | KGQVFALSTHPYGNRVIQRILEHC |
| | | E17 with | | LPDQTLPILEELHQHTEQLVQDQY |
| | | linker | | GSYVIRHVLEHGRPEDKSKIVAEI |
| | | between | | RGNVLVLSQHKFASNVVEKCVTH |
| | | 8PUF and | | ASRTERAVLIDEVCTMNDGPHSA |
| | | E17 | | LYTMMKDQYANYVVQKMIDVAE |
| | | | | PGQRKIVMHKIRPHIATLRKYTYG |
| | | | | KHILAKLEKYYMKNGVDLG (SEQ |
| | | | | ID NO: 644) |

### Amino Acid Sequences of Transgene Elements in Order N-Terminal to C-Terminal (Blocking or *Cleaving)

| Plasmid | |
|---|---|
| Element | Amino Acid Sequences |
| Rb-NLS | DRVLKRSAEGSNPPKPLKKLR |
| | (SEQ ID NO: 543) |
| Linker | GGS |
| 8PUF | GRSRLLEDFRNNRYPNLQLR |
| | EIAGHIMEFSQDQHGSRFIE |
| | LKLERATPAERQLVFNEILQ |
| | AAYQLMVDVFGNYVIQKFFE |
| | FGSLEQKLALAERIRGHVLS |
| | LALOMYGSFVIRKALEFIPS |
| | DQQNEMVRELDGHVLKCVKD |
| | QNGSYVVEKCIECVQPQSLQ |
| | FIIDAFKGQVFALSTHPYGN |
| | RVIQRILEHCLPDQTLPILE |
| | ELHQHTEQLVQDQYGSYVIR |
| | HVLEHGRPEDKSKIVAEIRG |
| | NVLVLSQHKFASNVVEKCVT |
| | HASRTERAVLIDEVCTMNDG |
| | PHSALYTMMKDQYANYVVQK |
| | MIDVAEPGQRKIVMHKIRPH |
| | IATLRKYTYGKHILAKLEKY |
| | YMKNGVDLG |
| | (SEQ ID NO: 644) |
| *Linker | VDTANGS |
| | (SEQ ID NO: 411) |
| *Endonuclease | GGGTPKAPNLEPPLPEEEKE |
| | GSDLRPVVIDGSNVAMSHGN |
| | KEVFSCRGILLAVNWFLERG |
| | HTDITVFVPSWRKEQPRPDV |
| | PITDQHILRELEKKKILVFT |
| | PSRRVGGKRVVCYDDRFIVK |
| | LAYESDGIVVSNDTYRDLQG |
| | ERQEWKRFIEERLLMYSFVN |
| | DKFMPPDDPLGRHGPSLDNF |
| | LRKKPLTLE |
| | (SEQ ID NO: 358) |

8PUF Targeting CUGf3 (DM1) w/Stacking Mutations to C w/or w/o Endonuclease

| | Pro- | | Target | |
|---|---|---|---|---|
| Con- | tein | Ele- | Se- | PUF Amino Acid |
| struct | Type | ments | quence | Sequence |
| A02144 | 8PUF | N- | UGCUGCUG | GRSRLLEDFRNNRYP |
| | | terminal | (SEQ ID | NLQLREIAGHIMEFS |
| | | Rb NLS, | NO: 453) | QDQHGSRFIELKLER |
| | | Linker | | ATPAERQLVFNEILQ |
| | | between | | AAYQLMVDVFGNYVI |
| | | NLS and | | QKFFEFGSLEQKLAL |
| | | 8PUF, C- | | AERIRGHVLSLALQM |
| | | terminal | | YGSRVIRKALEFIPS |
| | | E17 with | | DQQNEMVRELDGHVL |
| | | linker | | KCVKDQNGSHVVEKC |
| | | between | | IECVQPQSLQFIIDA |
| | | 8PUF and | | FKGQVFALSTHPYGN |
| | | E17 | | RVIQRILEHCLPDQT |
| | | | | LPILEELHQHTEQLV |
| | | | | QDQYGSFVIRHVLEH |
| | | | | GRPEDKSKIVAEIRG |
| | | | | NVLVLSQHKFASNVV |
| | | | | EKCVTHASRTERAVL |
| | | | | IDEVCTMNDGPHSAL |
| | | | | YTMMKDQYANYVVQK |
| | | | | MIDVAEPGQRKIVMH |
| | | | | KIRPHIATLRKYTYG |
| | | | | KHILAKLEKYYMKNG |
| | | | | VDLG (SEQ |
| | | | | ID NO: 645) |

### Amino Acid Sequences of Transgene Elements in Order N-Terminal to C-Terminal (Blocking or *Cleaving)

| Plasmid | |
|---|---|
| Element | Amino Acid Sequences |
| Rb-NLS | (SEQ ID NO: 543) |
| Linker | GGS |
| 8PUF | GRSRLLEDFRNNRYPNLQLREIAGH |
| | IMEFSQDQHGSRFIELKLERATPAE |
| | RQLVFNEILQAAYQLMVDVFGNYVI |
| | QKFFEFGSLEQKLALAERIRGHVLS |
| | LALQMYGSRVIRKALEFIPSDQQN |
| | EMVRELDGHVLKCVKDQNGSHVVEK |
| | CIECVQPQSLQFIIDAFKGQVFALS |
| | THPYGNRVIQRILEHCLPDQTLPIL |
| | EELHQHTEQLVQDQYGSFVIRHVLE |
| | HGRPEDKSKIVAEIRGNVLVLSQHK |
| | FASNVVEKCVTHASRTERAVLIDEV |
| | CTMNDGPHSALYTMMKDQYANYVVQ |
| | KMIDVAEPGQRKIVMHKIRPHIATL |
| | RKYTYGKHILAKLEKYYMKNGVDLG |
| | (SEQ ID NO: 645) |
| *Linker | VDTANGS |
| *Endonuclease | GGGTPKAPNLEPPLPEEEKEGSDLR |
| | PVVIDGSNVAMSHGNKEVFSCRGIL |
| | LAVNWFLERGHTDITVFVPSWRKEQ |
| | PRPDVPITDQHILRELEKKKILVFT |
| | PSRRVGGKRVVCYDDRFIVKLAYES |
| | DGIVVSNDTYRDLQGERQEWKRFIE |
| | ERLLMYSFVNDKFMPPDDPLGRHGP |
| | SLDNFLRKKPLTLE |
| | (SEQ ID NO: 358) |

8PUF Targeting CUGf3 DM1 w/Stacking Mutations to C w/or w/o Endonuclease

| | Pro- | | Target | |
|---|---|---|---|---|
| Con- | tein | Ele- | Se- | PUF Amino Acid |
| struct | Type | ments | quence | Sequence |
| A02145 | 8PUF | N- | UGCUGCUG | GRSRLLEDFRNNRYP |
| | | terminal | (SEQ ID | NLQLREIAGHIMEFS |
| | | Rb NLS, | NO: 453) | QDQHGSRFIELKLER |
| | | Linker | | ATPAERQLVFNEILQ |
| | | between | | AAYQLMVDVFGNYVI |
| | | NLS and | | QKFFEFGSLEQKLAL |
| | | 8PUF, C- | | AERIRGHVLSLALQM |
| | | terminal | | YGSRVIRKALEFIPS |
| | | E17 with | | DQQNEMVRELDGHVL |
| | | linker | | KCVKDQNGSYVVEKC |
| | | between | | IECVQPQSLQFIIDA |
| | | 8PUF | | FKGQVFALSTHPYGN |
| | | and | | RVIQRILEHCLPDQT |
| | | E17 | | LPILEELHQHTEQL |
| | | | | VQDQYGSFVIRHVLE |
| | | | | HGRPEDKSKIVAEIR |
| | | | | GNVLVLSQHKFASNV |
| | | | | VEKCVTHASRTERAV |
| | | | | LIDEVCTMNDGPHSA |
| | | | | LYTMMKDQYANYVVQ |
| | | | | KMIDVAEPGQRKIVM |
| | | | | HKIRPHIATLRKYTY |
| | | | | GKHILAKLEKYYMKN |
| | | | | GVDLG |
| | | | | (SEQ ID |
| | | | | NO: 646) |

### Amino Acid Sequences of Transgene Elements in Order N-Terminal to C-Terminal (Blocking or *Cleaving)

| Plasmid | |
|---|---|
| Element | Amino Acid Sequences |
| Rb-NLS | DRVLKRSAEGSNPPKPLKKL |
| | R |
| | (SEQ ID NO: 543) |
| Linker | GGS |
| 8PUF | GRSRLLEDFRNNRYPNLQLR |
| | EIAGHIMEFSQDQHGSRFIE |
| | LKLERATPAERQLVFNEILQ |
| | AAYQLMVDVFGNYVIQKFFE |
| | FGSLEQKLALAERIRGHVLS |
| | LALQMYGSRVIRKALEFIPS |
| | DQQNEMVRELDGHVLKCVKD |
| | QNGSYVVEKCIECVQPQSLQ |
| | FIIDAFKGQVFALSTHPYGN |
| | RVIQRILEHCLPDQTLPILE |
| | ELHQHTEQLVQDQYGSFVIR |
| | HVLEHGRPEDKSKIVAEIRG |
| | NVLVLSQHKFASNVVEKCVT |
| | HASRTERAVLIDEVCTMNDG |
| | PHSALYTMMKDQYANYVVQK |
| | MIDVAEPGQRKIVMHKIRPH |
| | IATLRKYTYGKHILAKLEKY |
| | YMKNGVDLG |
| | (SEQ ID NO: 646) |
| *Linker | VDTANGS (SEQ ID NO: |
| | 411) |
| *Endonuclease | GGGTPKAPNLEPPLPEEEKE |
| | GSDLRPVVIDGSNVAMSHGN |
| | KEVFSCRGILLAVNWFLERG |
| | HTDITVFVPSWRKEQPRPDV |
| | PITDQHILRELEKKKILVFT |
| | PSRRVGGKRVVCYDDRFIVK |
| | LAYESDGIVVSNDTYRDLQG |
| | ERQEWKRFIEERLLMYSFVN |
| | DKFMPPDDPLGRHGPSLDNF |
| | LRKKPLTLE |
| | (SEQ ID NO: 358) |

### 8PUF Targeting CUGf3 (DM1) w/ Stacking Mutations to C w/ or w/o Endonuclease

| | Pro- | | Target | |
|---|---|---|---|---|
| Con- | tein | Ele- | Se- | PUF Amino Acid |
| struct | Type | ments | quence | Sequence |
| A02146 | 8PUF | N- | UGCUGCUG | GRSRLLEDFRNNRYP |
| | | terminal | (SEQ ID | NLQLREIAGHIMEFS |
| | | Rb NLS, | NO: 453) | QDQHGSRFIELKLER |
| | | Linker | | ATPAERQLVFNEILQ |
| | | between | | AAYQLMVDVFGNYVI |
| | | NLS and | | QKFFEFGSLEQKLAL |
| | | 8PUF, | | AERIRGHVLSLALQM |
| | | C- | | YGSRVIRKALEFIPS |
| | | terminal | | DQQNEMVRELDGHVL |
| | | E17 with | | KCVKDQNGSNVVEKC |
| | | linker | | IECVQPQSLQFIIDA |
| | | between | | FKGQVFALSTHPYGN |
| | | 8PUF and | | RVIQRILEHCLPDQT |
| | | E17 | | LPILEELHQHTEQL |
| | | | | VQDQYGSFVIRHVLE |
| | | | | HGRPEDKSKIVAEIR |
| | | | | GNVLVLSQHKFASNV |
| | | | | VEKCVTHASRTERAV |
| | | | | LIDEVCTMNDGPHSA |
| | | | | LYTMMKDQYANYVVQ |
| | | | | KMIDVAEPGQRKIVM |
| | | | | HKIRPHIATLRKYTY |
| | | | | GKHILAKLEKYYMKN |
| | | | | GVDLG |
| | | | | (SEQ ID |
| | | | | NO: 647) |

### Amino Acid Sequences of Transgene Elements in Order N-Terminal to C-Terminal (Blocking or * Cleaving)

| Plasmid | Amino Acid |
|---|---|
| Element | Sequences |
| Rb-NLS | DRVLKRSAEGSNPPK |
| | PLKKLR |
| | (SEQ ID NO: 543) |
| Linker | GGS |
| 8PUF | GRSRLLEDFRNNRYP |
| | NLQLREIAGHIMEFS |
| | QDQHGSRFIELKLER |
| | ATPAERQLVFNEILQ |
| | AAYQLMVDVFGNYVI |
| | QKFFEFGSLEQKLAL |
| | AERIRGHVLSLALOM |
| | YGSRVIRKALEFIPS |
| | DQQNEMVRELDGHVL |
| | KCVKDQNGSNVVEKC |
| | IECVQPQSLQFIIDA |
| | FKGQVFALSTHPYGN |
| | RVIQRILEHCLPDQT |
| | LPILEELHQHTEQLV |
| | QDQYGSFVIRHVLEH |
| | GRPEDKSKIVAEIRG |
| | NVLVLSQHKFASNVV |
| | EKCVTHASRTERAVL |
| | IDEVCTMNDGPHSAL |
| | YTMMKDQYANYVVQK |
| | MIDVAEPGQRKIVMH |
| | KIRPHIATLRKYTYG |
| | KHILAKLEKYYMKNG |
| | VDLG |
| | (SEQ ID NO: 647) |
| *Linker | VDTANGS (SEQ ID |
| | NO: 411) |
| *Endonuclease | GGGTPKAPNLEPPLP |
| | EEEKEGSDLRPVVID |
| | GSNVAMSHGNKEVFS |
| | CRGILLAVNWFLERG |
| | HTDITVFVPSWRKEQ |
| | PRPDVPITDQHILRE |
| | LEKKKILVFTPSRRV |
| | GGKRVVCYDDRFIVK |
| | LAYESDGIVVSNDTY |
| | RDLQGERQEWKRFIE |
| | ERLLMYSFVNDKFMP |
| | PDDPLGRHGPSLDNF |
| | LRKKPLTLE |
| | (SEQ ID NO: 358) |

### 8PUF Targeting CUGf3 (DM1) w/ Stacking Mutations to C w/ or w/o Endonuclease

| | Pro- | | Target | |
|---|---|---|---|---|
| Con- | tein | Ele- | Se- | PUF Amino Acid |
| struct | Type | ments | quence | Sequence |
| A02147 | 8PUF | N- | UGCUGCUG | GRSRLLEDFRNNRYP |
| | | terminal | (SEQ ID | NLQLREIAGHIMEFS |
| | | Rb NLS, | NO: 453) | QDQHGSRFIELKLER |
| | | Linker | | ATPAERQLVFNEILQ |
| | | between | | AAYQLMVDVFGNYVI |
| | | NLS and | | QKFFEFGSLEQKLAL |
| | | 8PUF, C- | | AERIRGHVLSLALQM |
| | | terminal | | YGSFVIRKALEFIPS |
| | | E17 with | | DQQNEMVRELDGHVL |
| | | linker | | KCVKDQNGSFVVEKC |
| | | between | | IECVQPQSLQFIIDA |
| | | 8PUF and | | FKGQVFALSTHPYGN |
| | | E17 | | RVIQRILEHCLPDQT |
| | | | | LPILEELHQHTEQLV |
| | | | | QDQYGSFVIRHVLEH |
| | | | | GRPEDKSKIVAEIRG |
| | | | | NVLVLSQHKFASNVV |
| | | | | EKCVTHASRTERAVL |
| | | | | IDEVCTMNDGPHSAL |
| | | | | YTMMKDQYANYVVQK |
| | | | | MIDVAEPGQRKIVMH |
| | | | | KIRPHIATLRKYTYG |
| | | | | KHILAKLEKYYMKNG |
| | | | | VDLG |
| | | | | (SEQ ID NO: 648) |

### Amino Acid Sequences of Transgene Elements in Order N-Terminal to C-Terminal (Blocking or *Cleaving)

| Plasmid | Amino Acid |
|---|---|
| Element | Sequences |
| Rb-NLS | DRVLKRSAEGSNPPK |
| | PLKKLR |
| | (SEQ ID NO: 543) |
| Linker | GGS |
| 8PUF | GRSRLLEDFRNNRYP |
| | NLQLREIAGHIMEFS |
| | QDQHGSRFIELKLER |
| | ATPAERQLVFNEILQ |
| | AAYQLMVDVFGNYVI |
| | QKFFEFGSLEQKLAL |
| | AERIRGHVLSLALOM |
| | YGSFVIRKALEFIPS |
| | DQQNEMVRELDGHVL |
| | KCVKDQNGSFVVEKC |
| | IECVQPQSLQFIIDA |
| | FKGQVFALSTHPYGN |
| | RVIQRILEHCLPDQT |
| | LPILEELHQHTEQLV |
| | QDQYGSFVIRHVLEH |
| | GRPEDKSKIVAEIRG |
| | NVLVLSQHKFASNVV |
| | EKCVTHASRTERAVL |
| | IDEVCTMNDGPHSAL |
| | YTMMKDQYANYVVQK |
| | MIDVAEPGQRKIVMH |
| | KIRPHIATLRKYTYG |
| | KHILAKLEKYYMKNG |
| | VDLG |
| | (SEQ ID NO: 648) |
| *Linker | VDTANGS |
| | (SEQ ID NO: 411) |
| *Endonuclease | GGGTPKAPNLEPPLP |
| | EEEKEGSDLRPVVID |
| | GSNVAMSHGNKEVFS |
| | CRGILLAVNWFLERG |
| | HTDITVFVPSWRKEQ |
| | PRPDVPITDQHILRE |
| | LEKKKILVFTPSRRV |
| | GGKRVVCYDDRFIVK |
| | LAYESDGIVVSNDTY |
| | RDLQGERQEWKRFIE |
| | ERLLMYSFVNDKFMP |
| | PDDPLGRHGPSLDNF |
| | LRKKPLTLE |
| | (SEQ ID NO: 358) |

8PUF Targeting CUGf3 (DM1) w/Stacking Mutations to C w/or w/o Endonuclease

| | Pro- | | Target | |
|---|---|---|---|---|
| Con- | tein | Ele- | Se- | PUF Amino Acid |
| struct | Type | ments | quence | Sequence |
| A02148 | 8PUF | N- | UGCUGCUG | GRSRLLEDFRNNRYP |
| | | terminal | (SEQ ID | NLQLREIAGHIMEFS |
| | | Rb NLS, | NO: 453) | QDQHGSRFIELKLER |
| | | Linker | | ATPAERQLVFNEILQ |
| | | between | | AAYQLMVDVFGNYVI |
| | | NLS and | | QKFFEFGSLEQKLAL |
| | | 8PUF, | | AERIRGHVLSLALQM |
| | | C-terminal | | YGSFVIRKALEFIPS |
| | | E17 with | | DQQNEMVRELDGHVL |
| | | linker | | KCVKDQNGSYVVEKC |
| | | between | | IECVQPQSLQFIIDA |
| | | 8PUF and | | FKGQVFALSTHPYGN |
| | | E17 | | RVIQRILEHCLPDQT |
| | | | | LPILEELHQHTEQL |
| | | | | VQDQYGSFVIRHVLE |
| | | | | HGRPEDKSKIVAEIR |
| | | | | GNVLVLSQHKFASNV |
| | | | | VEKCVTHASRTERAV |
| | | | | LIDEVCTMNDGPHSA |
| | | | | LYTMMKDQYANYVVQ |
| | | | | KMIDVAEPGQRKIVM |
| | | | | HKIRPHIATLRKYTY |
| | | | | GKHILAKLEKYYMKN |
| | | | | GVDLG |
| | | | | (SEQ ID |
| | | | | NO: 649) |

### Amino Acid Sequences of Transgene Elements in Order N-Terminal to C-Terminal

| Plasmid | Amino Acid |
|---|---|
| Element | Sequences |
| Rb-NLS | DRVLKRSAEGSNPPK |
| | PLKKLR |
| | (SEQ ID NO: 543) |
| Linker | GGS |
| 8PUF | GRSRLLEDFRNNRYP |
| | NLQLREIAGHIMEFS |
| | QDQHGSRFIELKLER |
| | ATPAERQLVFNEILQ |
| | AAYQLMVDVFGNYVI |
| | QKFFEFGSLEQKLAL |
| | AERIRGHVLSLALOM |
| | YGSFVIRKALEFIPS |
| | DQQNEMVRELDGHVL |
| | KCVKDQNGSYVVEKC |
| | IECVQPQSLQFIIDA |
| | FKGQVFALSTHPYGN |
| | RVIQRILEHCLPDQT |
| | LPILEELHQHTEQLV |
| | QDQYGSFVIRHVLEH |
| | GRPEDKSKIVAEIRG |
| | NVLVLSQHKFASNVV |
| | EKCVTHASRTERAVL |
| | IDEVCTMNDGPHSAL |
| | YTMMKDQYANYVVQK |
| | MIDVAEPGQRKIVMH |
| | KIRPHIATLRKYTYG |
| | KHILAKLEKYYMKNG |
| | VDLG |
| | (SEQ ID NO: 649) |
| *Linker | VDTANGS |
| | (SEQ ID NO: 411) |
| *Endonuclease | GGGTPKAPNLEPPLP |
| | EEEKEGSDLRPVVID |
| | GSNVAMSHGNKEVFS |
| | CRGILLAVNWFLERG |
| | HTDITVFVPSWRKEQ |
| | PRPDVPITDQHILRE |
| | LEKKKILVFTPSRRV |
| | GGKRVVCYDDRFIVK |
| | LAYESDGIVVSNDTY |
| | RDLQGERQEWKRFIE |
| | ERLLMYSFVNDKFMP |
| | PDDPLGRHGPSLDNF |
| | LRKKPLTLE |
| | (SEQ ID NO: 358) |

### 8PUF Targeting CUGf3 (DM1) w/ Stacking Mutations to C w/ or w/o Endonuclease

| | Pro- | | Target | |
|---|---|---|---|---|
| Con- | tein | Ele- | Se- | PUF Amino Acid |
| struct | Type | ments | quence | Sequence |
| A01926 | 8PUF | N- | UGCUGCUG | GRSRLLEDFRNNRYP |
| | | terminal | | NLQLREIAGHIMEFS |
| | | Rb NLS, | | QDQHGSNFIELKLER |
| | | Linker | | ATPAERQLVFNEILQ |
| | | between | | AAYQLMVDVFGNYVI |
| | | NLS and | | QKFFEFGSLEQKLAL |
| | | 8PUF, C- | | AERIRGHVLSLALQM |
| | | terminal | | YGSYVIRKALEFIPS |
| | | E17 with | | DQQNEMVRELDGHVL |
| | | linker | | KCVKDQNGSNVVEKC |
| | | between | | IECVQPQSLQFIIDA |
| | | 8PUF and | | FKGQVFALSTHPYGN |
| | | E17 | | YVIQRILEHCLPDQT |
| | | | | LPILEELHQHTEQLV |
| | | | | QDQYGSYVIRHVLEH |
| | | | | GRPEDKSKIVAEIRG |
| | | | | NVLVLSQHKFASNVV |
| | | | | EKCVTHASRTERAVL |
| | | | | IDEVCTMNDGPHSAL |
| | | | | YTMMKDQYANYVVQK |
| | | | | MIDVAEPGQRKIVMH |
| | | | | KIRPHIATLRKYTYG |
| | | | | KHILAKLEKYYMKNG |
| | | | | VDLG |
| | | | | (SEQ ID |
| | | | | NO: 651) |

### Amino Acid Sequences of Transgene Elements in Order N-Terminal to C-Terminal (Blocking or *Cleaving)

| Plasmid | Amino Acid |
|---|---|
| Element | Sequences |
| Rb-NLS | DRVLKRSAEGSNPPK |
| | PLKKLR |
| | (SEQ ID NO: 543) |
| Linker | GGS |
| 8PUF | GRSRLLEDFRNNRYP |
| | NLQLREIAGHIMEFS |
| | QDQHGSNFIELKLER |
| | ATPAERQLVFNEILQ |
| | AAYQLMVDVFGNYVI |
| | QKFFEFGSLEQKLAL |
| | AERIRGHVLSLALOM |
| | YGSYVIRKALEFIPS |
| | DQQNEMVRELDGHVL |
| | KCVKDQNGSNVVEKC |
| | IECVQPQSLQFIIDA |
| | FKGQVFALSTHPYGN |
| | YVIQRILEHCLPDQT |
| | LPILEELHQHTEQLV |
| | QDQYGSYVIRHVLEH |
| | GRPEDKSKIVAEIRG |
| | NVLVLSQHKFASNVV |
| | EKCVTHASRTERAVL |
| | IDEVCTMNDGPHSAL |
| | YTMMKDQYANYVVQK |
| | MIDVAEPGQRKIVMH |
| | KIRPHIATLRKYTYG |
| | KHILAKLEKYYMKNG |
| | VDLG |
| | (SEQ ID NO: 651) |
| *Linker | VDTANGS (SEQ ID |
| | NO: 411) |
| *Endonuclease | GGGTPKAPNLEPPLP |
| | EEEKEGSDLRPVVID |
| | GSNVAMSHGNKEVFS |
| | CRGILLAVNWFLERG |
| | HTDITVFVPSWRKEQ |
| | PRPDVPITDQHILRE |
| | LEKKKILVFTPSRRV |
| | GGKRVVCYDDRFIVK |
| | LAYESDGIVVSNDTY |
| | RDLQGERQEWKRFIE |
| | ERLLMYSFVNDKFMP |
| | PDDPLGRHGPSLDNF |
| | LRKKPLTLE |
| | (SEQ ID NO: 358) |

### Vectors

[0669] In some embodiments of the compositions and methods of the disclosure, a vector comprises a guide RNA of the disclosure. In some embodiments, the vector comprises at least one guide RNA of the disclosure. In some embodiments, the vector comprises one or more guide RNA(s) of the disclosure. In some embodiments, the vector comprises two or more guide RNAs of the disclosure. In one embodiment, the vector comprises three guide RNAs. In one embodiment, the vector comprises four guide RNAs. In some embodiments, the vector further comprises a guided or non-guided RNA-binding protein of the disclosure. In some embodiments, the vector further comprises an RNA-binding fusion protein of the disclosure. In some embodiments, the fusion protein comprises a first RNA binding protein and a second RNA binding protein. In some embodiments, the RNA-guided RNA-binding systems comprising an RNA-binding protein and a gRNA are in a single vector. In a particular embodiment, the single vector comprises the RNA-guided RNA-binding systems which are Cas13d RNA-guided RNA-binding systems or catalytic deactivated Cas13d (dCas13d) RNA-guided RNA-binding systems. In one embodiment, the single vector comprises the Cas13d RNA-guided RNA-binding systems which are CasRx or dCasRx RNA-guided RNA-binding systems. In another embodiment, the single vector comprises a non-guided RNA-binding system comprising a PUF or PUMBY-based protein fused with a nuclease domain from ZC3H12A, such as E17 (SEQ ID NO: 358). In another embodiment, the single vector comprises a dCas13d RNA-binding system fused with a nuclease domain from ZC3H12A, such as E17 (SEQ ID NO: 358).

[0670] In some embodiments of the compositions and methods of the disclosure, a first vector comprises a guide RNA of the disclosure and a second vector comprises an RNA-binding protein or RNA-binding fusion protein of the disclosure. In some embodiments, the first vector comprises at least one guide RNA of the disclosure. In some embodiments, the first vector comprises one or more guide RNA(s) of the disclosure. In some embodiments, the first vector comprises two or more guide RNA(s) of the disclosure. In some embodiments, the fusion protein comprises a first RNA binding protein and a second RNA binding protein. In some embodiments, the first vector and the second vector are identical vectors or vector serotypes. In some embodiments, the first vector and the second vector are not identical vectors or vector serotypes. In some embodiments of the compositions and methods of the disclosure, the RNA-binding systems capable of targeting toxic CUG RNA repeats are in a single vector.

[0671] One type of vector is a “plasmid,” which refers to a circular double stranded DNA loop into which additional DNA segments can be inserted, such as by standard molecular cloning techniques. Another type of vector is a viral vector, wherein virally-derived DNA or RNA sequences are present in the vector for packaging into a virus (e.g., retroviruses, replication defective retroviruses, adenoviruses, replication defective adenoviruses, and adeno-associated viruses). Viral vectors also include polynucleotides carried by a virus for transfection into a host cell. In some embodiments, the vector is a lentivirus (such as an integration-deficient lentiviral vector) or adeno-associated viral (AAV) vector. Vectors are capable of autonomous replication in a host cell into which they are introduced such as e.g., bacterial vectors having a bacterial origin of replication and episomal mammalian vectors and other vectors such as, e.g., non-episomal mammalian vectors, are integrated into the genome of a host cell upon introduction into the host cell, and thereby are replicated along with the host genome.

[0672] In some embodiments, vectors such as e.g., expression vectors, are capable of directing the expression of genes to which they are operatively-linked. Common expression vectors are often in the form of plasmids. In some embodiments, recombinant expression vectors comprise a nucleic acid provided herein such as e.g., a guide RNA which can be expressed from a DNA sequence, and a nucleic acid encoding a Cas13d protein, in a form suitable for expression of a protein in a host cell. Recombinant expression vectors include one or more regulatory elements, which may be selected on the basis of the host cells to be used for expression, that is operatively-linked to the nucleic acid sequence to be expressed. Within a recombinant expression vector, “operably linked” is intended to mean that the nucleotide sequence of interest is linked to the regulatory element(s) in a manner that allows for expression of the nucleotide sequence such as e.g., in an in vitro transcription/translation system or in a host cell when the vector is introduced into the host cell. Certain embodiments of a vector depend on factors such as the choice of the host cell to be transformed, and the level of expression desired. A vector can be introduced into host cells to thereby produce transcripts, proteins, or peptides, including fusion proteins or peptides, encoded by nucleic acids as described herein such as, e.g., CRISPR transcripts, proteins, enzymes, mutant forms thereof, fusion proteins thereof, etc.

[0673] In some embodiments of the compositions and methods of the disclosure, a vector of the disclosure is a viral vector. In some embodiments, the viral vector comprises a sequence isolated or derived from a retrovirus. In some embodiments, the viral vector comprises a sequence isolated or derived from a lentivirus. In some embodiments, the viral vector comprises a sequence isolated or derived from an adenovirus. In some embodiments, the viral vector comprises a sequence isolated or derived from an adeno-associated virus (AAV). In some embodiments, the viral vector is replication incompetent. In some embodiments, the viral vector is isolated or recombinant. In some embodiments, the viral vector is self-complementary.

[0674] The term “adeno-associated virus” or “AAV” as used herein refers to a member of the class of viruses associated with this name and belonging to the genus Dependoparvovirus, family Parvoviridae. Adeno-associated virus is a single-stranded DNA virus that grows in cells in which certain functions are provided by a co-infecting helper virus. General information and reviews of AAV can be found in, for example, Carter, 1989, Handbook of Parvoviruses, Vol. 1, pp. 169-228, and Berns, 1990, Virology, pp. 1743-1764, Raven Press, (New York). It is fully expected that the same principles described in these reviews will be applicable to additional AAV serotypes characterized after the publication dates of the reviews because it is well known that the various serotypes are quite closely related, both structurally and functionally, even at the genetic level. (See, for example, Blacklowe, 1988, pp. 165-174 of Parvoviruses and Human Disease, J. R. Pattison, ed.; and Rose, Comprehensive Virology 3: 1-61 (1974)). For example, all AAV serotypes apparently exhibit very similar replication properties mediated by homologous rep genes; and all bear three related capsid proteins such as those expressed in AAV2. The degree of relatedness is further suggested by heteroduplex analysis which reveals extensive cross-hybridization between serotypes along the length of the genome; and the presence of analogous self-annealing segments at the termini that correspond to “inverted terminal repeat sequences” (ITRs). The similar infectivity patterns also suggest that the replication functions in each serotype are under similar regulatory control. Multiple serotypes of this virus are known to be suitable for gene delivery; all known serotypes can infect cells from various tissue types.

[0675] AAV possesses unique features that make it attractive as a vector for delivering foreign DNA to cells, for example, in gene therapy. AAV infection of cells in culture is noncytopathic, and natural infection of humans and other animals is silent and asymptomatic. Moreover, AAV infects many mammalian cells allowing the possibility of targeting many different tissues in vivo. Moreover, AAV transduces slowly dividing and non-dividing cells, and can persist essentially for the lifetime of those cells as a transcriptionally active nuclear episome (extrachromosomal element). The AAV proviral genome is inserted as cloned DNA in plasmids, which makes construction of recombinant genomes feasible. Furthermore, because the signals directing AAV replication and genome encapsidation are contained within the ITRs of the AAV genome, some or all of the internal approximately 4.3 kb of the genome (encoding replication and structural capsid proteins, rep-cap) may be replaced with foreign DNA to generate AAV vectors. The rep and cap proteins may be provided in trans. Another significant feature of AAV is that it is an extremely stable and hearty virus. It easily withstands the conditions used to inactivate adenovirus (560 to 65° C. for several hours), making cold preservation of AAV less critical. AAV may even be lyophilized. Finally, AAV-infected cells are not resistant to superinfection.

[0676] AAV (AAV or AAV vector) genomes of the invention comprise, consist essentially of, or consist of a nucleic acid molecule encoding a CUG-repeat targeting composition (such as a PUF, PUMBY, or RNA-guided protein) and one or more AAV ITRs flanking the nucleic acid molecule. Production of pseudotyped AAV is disclosed in, for example, WO2001083692. Other types of AAV variants, for example rAAV with capsid mutations, are also contemplated. See, e.g., Marsic et al., Molecular Therapy, 22(11): 1900-1909 (2014). The nucleotide sequences of the genomes of various AAV serotypes are known in the art.

[0677] In some embodiments of the compositions and methods of the disclosure, the viral vector comprises a sequence isolated or derived from an adeno-associated virus (AAV). In some embodiments, the viral vector comprises an inverted terminal repeat sequence or a capsid sequence that is isolated or derived from an AAV of serotype AAVrh.74, AAV1, AAV2, AAV3, AAV4, AAV5, AAV6, AAV7, AAV8, AAV9, AAV10 (AAVrh10), AAV11 or AAV12. In one embodiment, the AAV vector comprises a modified capsid. In one embodiment the AAV vector is an AAV2-Tyr mutant vector. In one embodiment the AAV vector comprises a capsid with a non-tyrosine amino acid at a position that corresponds to a surface-exposed tyrosine residue in position Tyr252, Tyr272, Tyr275, Tyr281, Tyr508, Tyr612, Tyr704, Tyr720, Tyr730 or Tyr673 of wild-type AAV2. See also WO 2008/124724 incorporated herein in its entirety. In some embodiments, the AAV vector comprises an engineered capsid. AAV vectors comprising engineered capsids include without limitation, AAV2.7m8, AAV9.7m8, AAV2 2tYF, and AAV8 Y733F). In some embodiments, the viral vector is replication incompetent. In some embodiments, the viral vector is isolated or recombinant (rAAV). In some embodiments, the viral vector is self-complementary (scAAV).

[0678] In some embodiments of the compositions and methods of the disclosure, a vector of the disclosure is a non-viral vector. In some embodiments, the vector comprises or consists of a nanoparticle, a micelle, a liposome or lipoplex, a polymersome, a polyplex or a dendrimer. In some embodiments, the vector is an expression vector or recombinant expression system. As used herein, the term “recombinant expression system” refers to a genetic construct for the expression of certain genetic material formed by recombination.

[0679] In some embodiments of the compositions and methods of the disclosure, an expression vector, viral vector or non-viral vector provided herein, includes without limitation, an expression control element. An “expression control element” as used herein refers to any sequence that regulates the expression of a coding sequence, such as a gene. Exemplary expression control elements include but are not limited to promoters, enhancers, microRNAs, post-transcriptional regulatory elements, polyadenylation signal sequences, and introns. Expression control elements may be constitutive, inducible, repressible, or tissue-specific, for example. A “promoter” is a control sequence that is a region of a polynucleotide sequence at which initiation and rate of transcription are controlled. It may contain genetic elements at which regulatory proteins and molecules may bind such as RNA polymerase and other transcription factors. In some embodiments, expression control by a promoter is tissue-specific. In some embodiments, expression control by a promoter is constitutive or ubiquitous. Non-limiting exemplary promoters include a Pol III promoter such as, e.g., U6 and H1 promoters and/or a Pol II promoter e.g., SV40, CMV (optionally including the CMV enhancer), RSV (Rous Sarcoma Virus LTR promoter (optionally including RSV enhancer), CBA (hybrid CMV enhancer/chicken ß-actin), CAG (hybrid CMV enhancer fused to chicken ß-actin), truncated CAG, Cbh (hybrid CBA), EF-1a (human elongation factor alpha-1) or EFS (short intron-less EF-1 alpha), PGK (phosphoglycerol kinase), CEF (chicken embryo fibroblasts), UBC (ubiquitin C), GUSB (lysosomal enzyme beta-glucuronidase), UCOE (ubiquitous chromatin opening element), hAAT (alpha-1 antitrypsin), TBG (thyroxine binding globulin), Desmin (full-length or truncated), MCK (muscle creatine kinase), C5-12 (synthetic muscle promoter), CK8e (creatin kinase 8), NSE (neuron-specific enolase), Synapsin, Synapsin-1 (SYN-1), opsin, PDGF (platelet-derived growth factor), PDGF-A, MecP2 (methyl CpG-binding protein 2), CaMKII (Calcium/Calmodulin-dependent protein kinase II), mGluR2 (metabotropic glutamate receptor 2), NFL (neurofilament light), NFH (neurofilament heavy), nβ2, PPE (rat preproenkephalin), ENK (preproenkephalin), Preproenkephalin-neurofilament chimeric promoter, EAAT2 (glutamate transporter), GFAP (glial fibrillary acidic protein), MBP (myelin basic protein), human rhodopsin kinase promoter (hGRK1), ß-actin promoter, dihydrofolate reductase promoter, MHCK7 (hybrid promoter of enhancer/promoter regions of muscle creatine kinase and alpha myosin heavy-chain genes) and combinations thereof. An “enhancer” is a region of DNA that can be bound by activating proteins to increase the likelihood or frequency of transcription. Non-limiting exemplary enhancers and posttranscriptional regulatory elements include the CMV enhancer, MCK enhancer, R-U5′ segment in LTR of HTLV-1, SV40 enhancer, the intron sequence between exons 2 and 3 of rabbit ß-globin, and Woodchuck Hepatitis Virus (WHP) Posttranscriptional Regulatory Element (WPRE). In some embodiments an intron is used to enhance promoter activity such as a UBB intron. In some embodiments, the UBB intron is used with an EFS promoter.

[0680] In some embodiments of the compositions and methods of the disclosure, an expression vector, viral vector or non-viral vector provided herein, includes without limitation, vector elements such as an IRES or 2A peptide sites for configuration of “multicistronic” or “polycistronic” or “bicistronic” or tricistronic” constructs, i.e., having double or triple or multiple coding areas or exons, and as such will have the capability to express from mRNA two or more proteins from a single construct. Multicistronic vectors simultaneously express two or more separate proteins from the same mRNA. The two strategies most widely used for constructing multicistronic configurations are through the use of an IRES or a 2A self-cleaving site. An “IRES” refers to an internal ribosome entry site or portion thereof of viral, prokaryotic, or eukaryotic origin which are used within polycistronic vector constructs. In some embodiments, an IRES is an RNA element that allows for translation initiation in a cap-independent manner. The term “self-cleaving peptides” or “sequences encoding self-cleaving peptides” or “2A self-cleaving site” refer to linking sequences which are used within vector constructs to incorporate sites to promote ribosomal skipping and thus to generate two polypeptides from a single promoter, such self-cleaving peptides include without limitation, T2A, and P2A peptides or other sequences encoding the self-cleaving peptides.

[0681] In one embodiment, exemplary vector configurations are shown in FIGS. 4A-4C. Exemplary vector configurations comprise a promoter or regulatory sequence (promoter/enhancer combination) driving the expression of the nucleic acid encoding the CUG-targeting PUF-endonuclease fusion. In another embodiment, a vector configuration comprises a promoter driving expression of the RNA-guided Cas RNase RNA-binding protein, or dCas protein fusion in operable linkage with a second promoter driving expressing of a cognate gRNA. In another embodiment, the vector configuration comprises a linker and one or more tags.

[0682] In some embodiments, the vector is a viral vector. In some embodiments, the vector is an adenoviral vector, an adeno-associated viral (AAV) vector, or a lentiviral vector. In some embodiments, the vector is a retroviral vector, an adenoviral/retroviral chimera vector, a herpes simplex viral I or II vector, a parvoviral vector, a reticuloendotheliosis viral vector, a polioviral vector, a papillomaviral vector, a vaccinia viral vector, or any hybrid or chimeric vector incorporating favorable aspects of two or more viral vectors. In some embodiments, the vector further comprises one or more expression control elements operably linked to the polynucleotide. In some embodiments, the vector further comprises one or more selectable markers. In some embodiments, the AAV vector has low toxicity. In some embodiments, the AAV vector does not incorporate into the host genome, thereby having a low probability of causing insertional mutagenesis. In some embodiments, the AAV vector can encode a range of total polynucleotides from 4.5 kb to 4.75 kb. In some embodiments, exemplary AAV vectors that may be used in any of the herein described compositions, systems, methods, and kits can include an AAV1 vector, a modified AAV1 vector, an AAV2 vector, a modified AAV2 vector, an AAV2-Tyr mutant vector, an AAV3 vector, a modified AAV3 vector, an AAV4 vector, a modified AAV4 vector, an AAV5 vector, a modified AAV5 vector, an AAV6 vector, a modified AAV6 vector, an AAV7 vector, a modified AAV7 vector, an AAV8 vector, an AAV9 vector, an AAV.rh10 vector, a modified AAV.rh10 vector, an AAV.rh32/33 vector, a modified AAV.rh32/33 vector, an AAV.rh43 vector, a modified AAV.rh43 vector, an AAV.rh64R1 vector, and a modified AAV.rh64R1 vector, an AAV-Tyr mutant vector, and any combinations or equivalents thereof In some embodiments, the lentiviral vector is an integrase-competent lentiviral vector (ICLV). In some embodiments, the lentiviral vector can refer to the transgene plasmid vector as well as the transgene plasmid vector in conjunction with related plasmids (e.g., a packaging plasmid, a rev expressing plasmid, an envelope plasmid) as well as a lentiviral-based particle capable of introducing exogenous nucleic acid into a cell through a viral or viral-like entry mechanism. Lentiviral vectors are well-known in the art (see, e.g., Trono D. (2002) Lentiviral vectors, New York: Spring-Verlag Berlin Heidelberg and Durand et al. (2011) Viruses 3(2):132-159 doi: 10.3390/v3020132). In some embodiments, exemplary lentiviral vectors that may be used in any of the herein described compositions, systems, methods, and kits can include a human immunodeficiency virus (HIV) 1 vector, a modified human immunodeficiency virus (HIV) 1 vector, a human immunodeficiency virus (HIV) 2 vector, a modified human immunodeficiency virus (HIV) 2 vector, a sooty mangabey simian immunodeficiency virus (SIV_{SM}) vector, a modified sooty mangabey simian immunodeficiency virus (SIV_{SM}) vector, a African green monkey simian immunodeficiency virus (SIV_{AGM}) vector, a modified African green monkey simian immunodeficiency virus (SIV_{AGM}) vector, an equine infectious anemia virus (EIAV) vector, a modified equine infectious anemia virus (EIAV) vector, a feline immunodeficiency virus (FIV) vector, a modified feline immunodeficiency virus (FIV) vector, a Visna/maedi virus (VNV/VMV) vector, a modified Visna/maedi virus (VNV/VMV) vector, a caprine arthritis-encephalitis virus (CAEV) vector, a modified caprine arthritis-encephalitis virus (CAEV) vector, a bovine immunodeficiency virus (BIV), or a modified bovine immunodeficiency virus (BIV).

### Nucleic Acids

[0683] Provided herein are the nucleic acid sequences encoding RNA-binding CUG repeat-targeting systems disclosed herein for use in gene transfer and expression techniques described herein. It should be understood, although not always explicitly stated that the sequences provided herein can be used to provide the expression product as well as substantially identical sequences that produce a protein that has the same biological properties. These “biologically equivalent” or “biologically active” or “equivalent” polypeptides are encoded by equivalent polynucleotides as described herein. They may possess at least 60%, or alternatively, at least 65%, or alternatively, at least 70%, or alternatively, at least 75%, or alternatively, at least 80%, or alternatively at least 85%, or alternatively at least 90%, or alternatively at least 95% or alternatively at least 98%, identical primary amino acid sequence to the reference polypeptide when compared using sequence identity methods run under default conditions. Specific polypeptide sequences are provided as examples of particular embodiments. Modifications to the sequences to amino acids with alternate amino acids that have similar charge. Additionally, an equivalent polynucleotide is one that hybridizes under stringent conditions to the reference polynucleotide or its complement or in reference to a polypeptide, a polypeptide encoded by a polynucleotide that hybridizes to the reference encoding polynucleotide under stringent conditions or its complementary strand. Alternatively, an equivalent polypeptide or protein is one that is expressed from an equivalent polynucleotide.

[0684] The nucleic acid sequences (e.g., polynucleotide sequences) disclosed herein may be codon-optimized which is a technique well known in the art. In some embodiments disclosed herein, exemplary Cas sequences, such as e.g., a nucleic acid sequence encoding SEQ ID NO: 92 (Cas13d known as CasRx) or the nucleic acid sequence encoding SEQ ID NO: 298 (Cas13d known as CasRx), are codon optimized for expression in human cells. Codon optimization refers to the fact that different cells differ in their usage of particular codons. This codon bias corresponds to a bias in the relative abundance of particular tRNAs in the cell type. By altering the codons in the sequence to match with the relative abundance of corresponding tRNAs, it is possible to increase expression. It is also possible to decrease expression by deliberately choosing codons for which the corresponding tRNAs are known to be rare in a particular cell type. Codon usage tables are known in the art for mammalian cells, as well as for a variety of other organisms. Based on the genetic code, nucleic acid sequences coding for, e.g., a Cas protein, can be generated. In some embodiments, such a sequence is optimized for expression in a host or target cell, such as a host cell used to express the Cas protein or a cell in which the disclosed methods are practiced (such as in a mammalian cell, e.g., a human cell). Codon preferences and codon usage tables for a particular species can be used to engineer isolated nucleic acid molecules encoding a Cas protein (such as one encoding a protein having at least 80%, at least 85%, at least 90%, at least 92%, at least 95%, at least 96%, at least 97%, at least 98%, at least 99%, or 100% sequence identity to its corresponding wild-type protein) that takes advantage of the codon usage preferences of that particular species. For example, the Cas proteins disclosed herein can be designed to have codons that are preferentially used by a particular organism of interest. In one example, a Cas nucleic acid sequence is optimized for expression in human cells, such as one having at least 70%, at least 80%, at least 85%, at least 90%, at least 92%, at least 95%, at least 98%, or at least 99% sequence identity to its corresponding wild-type or originating nucleic acid sequence. In some embodiments, an isolated nucleic acid molecule encoding at least one Cas protein (which can be part of a vector) includes at least one Cas protein coding sequence that is codon optimized for expression in a eukaryotic cell, or at least one Cas protein coding sequence codon optimized for expression in a human cell. In one embodiment, such a codon optimized Cas coding sequence has at least 80%, at least 85%, at least 90%, at least 92%, at least 95%, at least 96%, at least 97%, at least 98%, at least 99%, or 100% sequence identity to its corresponding wild-type or originating sequence. In another embodiment, a eukaryotic cell codon optimized nucleic acid sequence encodes a Cas protein having at least 85%, at least 90%, at least 92%, at least 95%, at least 96%, at least 97%, at least 98%, at least 99%, or 100% sequence identity to its corresponding wild-type or originating protein. In another embodiment, a variety of clones containing functionally equivalent nucleic acids may be routinely generated, such as nucleic acids which differ in sequence but which encode the same Cas protein sequence. Silent mutations in the coding sequence result from the degeneracy (i.e., redundancy) of the genetic code, whereby more than one codon can encode the same amino acid residue. Thus, for example, leucine can be encoded by CTT, CTC, CTA, CTG, TTA, or TTG; serine can be encoded by TCT, TCC, TCA, TCG, AGT, or AGC; asparagine can be encoded by AAT or AAC; aspartic acid can be encoded by GAT or GAC; cysteine can be encoded by TGT or TGC; alanine can be encoded by GCT, GCC, GCA, or GCG; glutamine can be encoded by CAA or CAG; tyrosine can be encoded by TAT or TAC; and isoleucine can be encoded by ATT, ATC, or ATA. Tables showing the standard genetic code can be found in various sources (see, for example, Stryer, 1988, Biochemistry, 3.sup.rd Edition, W. H. 5 Freeman and Co., NY).

[0685] “Hybridization” refers to a reaction in which one or more polynucleotides react to form a complex that is stabilized via hydrogen bonding between the bases of the nucleotide residues. The hydrogen bonding may occur by Watson-Crick base pairing, Hoogstein binding, or in any other sequence-specific manner. The complex may comprise two strands forming a duplex structure, three or more strands forming a multi-stranded complex, a single self-hybridizing strand, or any combination of these. A hybridization reaction may constitute a step in a more extensive process, such as the initiation of a PC reaction, or the enzymatic cleavage of a polynucleotide by a ribozyme.

[0686] Examples of stringent hybridization conditions include: incubation temperatures of about 25° C. to about 37° C.; hybridization buffer concentrations of about 6×SSC to about 10× SSC; formamide concentrations of about 0% to about 25%; and wash solutions from about 4×SSC to about 8×SSC. Examples of moderate hybridization conditions include: incubation temperatures of about 40° C. to about 50° C.; buffer concentrations of about 9×SSC to about 2×SSC; formamide concentrations of about 30% to about 50%; and wash solutions of about 5×SSC to about 2×SSC. Examples of high stringency conditions include: incubation temperatures of about 55° C. to about 68° C.; buffer concentrations of about 1×SSC to about 0.1×SSC; formamide concentrations of about 55% to about 75%; and wash solutions of about 1×SSC, 0.1×SSC, or deionized water. In general, hybridization incubation times are from 5 minutes to 24 hours, with 1, 2, or more washing steps, and wash incubation times are about 1, 2, or 15 minutes. SSC is 0.15 M NaCl and 15 mM citrate buffer. It is understood that equivalents of SSC using other buffer systems can be employed.

[0687] “Homology” or “identity” or “similarity” refers to sequence similarity between two peptides or between two nucleic acid molecules. Homology can be determined by comparing a position in each sequence which may be aligned for purposes of comparison. When a position in the compared sequence is occupied by the same base or amino acid, then the molecules are homologous at that position. A degree of homology between sequences is a function of the number of matching or homologous positions shared by the sequences. An “unrelated” or “non-homologous” sequence shares less than 40% identity, or alternatively less than 25% identity, with one of the sequences of the present invention.

### Cells

[0688] In some embodiments of the compositions and methods of the disclosure, a cell of the disclosure is a prokaryotic cell.

[0689] In some embodiments of the compositions and methods of the disclosure, a cell of the disclosure is a eukaryotic cell. In some embodiments, the cell is a mammalian cell. In some embodiments, the cell is a bovine, murine, feline, equine, porcine, canine, simian, or human cell. In some embodiments, the cell is a non-human mammalian cell such as a non-human primate cell.

[0690] In some embodiments, a cell of the disclosure is a somatic cell. In some embodiments, a cell of the disclosure is a germline cell. In some embodiments, a germline cell of the disclosure is not a human cell.

[0691] In some embodiments of the compositions and methods of the disclosure, a cell of the disclosure is a stem cell. In some embodiments, a cell of the disclosure is an embryonic stem cell. In some embodiments, an embryonic stem cell of the disclosure is not a human cell. In some embodiments, a cell of the disclosure is a multipotent stem cell or a pluripotent stem cell. In some embodiments, a cell of the disclosure is an adult stem cell. In some embodiments, a cell of the disclosure is an induced pluripotent stem cell (iPSC). In some embodiments, a cell of the disclosure is a hematopoietic stem cell (HSC).

[0692] In some embodiments of the compositions and methods of the disclosure, a somatic cell of the disclosure is a muscle cell. In some embodiments, a muscle cell of the disclosure is a myoblast or a myocyte. In some embodiments, a muscle cell of the disclosure is a cardiac muscle cell, skeletal muscle cell or smooth muscle cell. In some embodiments, a muscle cell of the disclosure is a striated cell. In one embodiment, a cell or cells of a patient treated with compositions disclosed herein include, without limitation, skeletal muscle (developing and mature muscle fibers and satellite cells), neuromuscular junction, cardiomyocytes, smooth muscle cells, peripheral nervous system (neurons), peripheral motor neurons, and/or sensory neurons.

[0693] In some embodiments of the compositions and methods of the disclosure, a somatic cell of the disclosure is a fibroblast or an epithelial cell. In some embodiments, an epithelial cell of the disclosure forms a squamous cell epithelium, a cuboidal cell epithelium, a columnar cell epithelium, a stratified cell epithelium, a pseudostratified columnar cell epithelium or a transitional cell epithelium. In some embodiments, an epithelial cell of the disclosure forms a gland including, but not limited to, a pineal gland, a thymus gland, a pituitary gland, a thyroid gland, an adrenal gland, an apocrine gland, a holocrine gland, a merocrine gland, a serous gland, a mucous gland and a sebaceous gland. In some embodiments, an epithelial cell of the disclosure contacts an outer surface of an organ including, but not limited to, a lung, a spleen, a stomach, a pancreas, a bladder, an intestine, a kidney, a gallbladder, a liver, a larynx or a pharynx. In some embodiments, an epithelial cell of the disclosure contacts an outer surface of a blood vessel or a vein.

[0694] In some embodiments of the compositions and methods of the disclosure, a somatic cell of the disclosure is a primary cell.

[0695] In some embodiments of the compositions and methods of the disclosure, a somatic cell of the disclosure is a cultured cell.

[0696] In some embodiments of the compositions and methods of the disclosure, a somatic cell of the disclosure is in vivo, in vitro, ex vivo or in situ.

[0697] In some embodiments of the compositions and methods of the disclosure, a somatic cell of the disclosure is autologous or allogeneic.

### Methods of Use

[0698] The disclosure provides a method of modifying level of expression of an RNA molecule of the disclosure or a protein encoded by the RNA molecule comprising contacting the composition of the disclosure and the RNA molecule under conditions suitable for binding of one or more of the guide RNA or the RNA-binding protein or RNA-binding fusion protein (or a portion thereof) to the RNA molecule.

[0699] The disclosure provides a method of modifying an activity of a protein encoded by an RNA molecule comprising contacting the composition of the disclosure and the RNA molecule under conditions suitable for binding of one or more of the guide RNA or the RNA-binding protein or the fusion protein (or a portion thereof) to the RNA molecule.

[0700] The disclosure provides a method of modifying level of expression of an RNA molecule of the disclosure or a protein encoded by the RNA molecule comprising contacting the composition of the disclosure and a cell comprising the RNA molecule under conditions suitable for binding of one or more of the guide RNA or the RNA-binding protein or fusion protein (or a portion thereof) to the RNA molecule. In some embodiments, the cell is in vivo, in vitro, ex vivo or in situ. In some embodiments, the composition of the disclosure comprises a vector comprising a guide RNA of the disclosure and an RNA-binding protein or fusion protein of the disclosure. In some embodiments, the vector is an AAV.

[0701] The disclosure provides a method of modifying an activity of a protein encoded by an RNA molecule comprising contacting the composition of the disclosure and a cell comprising the RNA molecule under conditions suitable for binding of one or more of the guide RNA or the RNA-binding protein or fusion protein (or a portion thereof) to the RNA molecule.

[0702] The disclosure provides a method of modifying the level of expression of an RNA molecule of the disclosure or a protein encoded by the RNA molecule comprising contacting the composition of the disclosure and the RNA molecule under conditions suitable for RNA nuclease activity wherein the RNA-binding protein or fusion protein induces a break in the RNA molecule.

[0703] The disclosure provides a method of modifying an activity of a protein encoded by an RNA molecule comprising contacting the composition of the disclosure and the RNA molecule under conditions suitable for RNA nuclease activity wherein the RNA-binding protein or fusion protein induces a break in the RNA molecule.

[0704] The disclosure provides a method of modifying a level of expression of an RNA molecule of the disclosure or a protein encoded by the RNA molecule comprising contacting the composition of the disclosure and a cell comprising the RNA molecule under conditions suitable for RNA nuclease activity wherein the RNA-binding protein or fusion protein induces a break in the RNA molecule. In some embodiments, the cell is in vivo, in vitro, ex vivo or in situ. In some embodiments, the composition comprises a vector comprising composition comprising a guide RNA of the disclosure and an RNA-binding fusion protein of the disclosure. In some embodiments, the vector is an AAV.

[0705] The disclosure provides a method of modifying an activity of a protein encoded by an RNA molecule comprising contacting the composition and a cell comprising the RNA molecule under conditions suitable for RNA nuclease activity wherein the RNA-binding protein or fusion protein induces a break in the RNA molecule. In some embodiments, the cell is in vivo, in vitro, ex vivo or in situ. In some embodiments, the composition comprises a vector comprising composition comprising a guide RNA or a single guide RNA of the disclosure and a nucleic acid sequence encoding an RNA-binding protein or fusion protein of the disclosure. In some embodiments, the vector is an AAV.

[0706] The disclosure provides a method of treating a disease or disorder comprising administering to a subject a therapeutically effective amount of a composition of the disclosure. In one embodiment, the disclosure provides a method of treating DM1.

[0707] The disclosure provides a method of treating a DM1 in a patient in need of such treatment comprising administering to the patient a therapeutically effective amount of a composition of the disclosure, wherein the composition comprises a vector comprising a guide RNA of the disclosure and a nucleic acid sequence encoding an RNA-binding protein or an RNA-binding protein fusion protein of the disclosure, wherein the composition modifies, reduces, destroys, knocks down or ablates a level of expression of a toxic CUG repeat RNA (compared to the level of expression of a toxic CUG repeat RNA treated with a non-targeting (NT) control or compared to no treatment). In one embodiment, the level of reduction of the target toxic CUG repeat RNA or toxic repeats encoded by the target RNA is compared to the level of reduction of the target RNA or toxic repeats encoded by the target RNA when treated with an RCas9 system. In another embodiment, the level of reduction is 1-fold or greater. In another embodiment, the level of reduction is 2-fold, 3-fold, 4-fold, 5-fold, 6-fold, 7-fold, 8-fold, 9-fold or 10-fold. In another embodiment, the level of reduction is 10-fold or greater. In another embodiment, the level of reduction is between 10-fold and 20-fold. In another embodiment, the level of reduction is 11-fold, 12-fold, 13-fold, 14-fold, 15-fold, 16-fold, 17-fold, 18-fold, 19-fold, or 20-fold. In another embodiment, the gene therapy compositions disclosed herein when administered to a DM1 patient lead to 20%-100% destruction (or elimination) of the toxic CUG repeat RNA. In one embodiment, the % elimination of the toxic CUG repeat RNA is any of 20-99%, 25%-99%, 50%-99%, 80%-99%, 90%-99%, 95%-99%. In one embodiment, the % elimination is 90%, 91%, 92%, 93%, 94%, 95%, 96%, 97%, 98%, or 99%. In another embodiment, % elimination is complete elimination or 100% elimination of the toxic CUG repeat RNA.

[0708] In some embodiments of the compositions and methods of the disclosure, a disease or disorder of the patient to be treated includes, without limitation, a disease or disorder related to CTG microsatellite repeat expansion expression. In some embodiments, the disease or disorder is related to CTG microsatellite repeat expansion in the 3′ untranslated region of the DMPK gene. In some embodiments of the compositions and methods of the disclosure, a disease or disorder of the disclosure is myotonic dystrophy type 1 (DM1).

[0709] In some embodiments of the methods of the disclosure, a subject of the disclosure has been diagnosed with DM1. In some embodiments, the subject of the disclosure presents at least one sign or symptom of DM1. At least one DM1 sign or DM1 symptom includes, without limitation, myotonia, muscle atrophy, centralized myonuclei, muscle strength recovery, GI distress, cardiac conduction defects, swallowing difficulty, respiratory capacity. In one embodiment, at least one sign or symptom of DM1 is ameliorated by treatment with the compositions disclosed herein. In some embodiments, the subject has a biomarker predictive of a risk of developing DM1. In some embodiments, the biomarker is a genetic mutation.

[0710] In some embodiments of the methods of the disclosure, a subject of the disclosure is female. In some embodiments of the methods of the disclosure, a subject of the disclosure is male. In some embodiments, a subject of the disclosure has two XX or XY chromosomes. In some embodiments, a subject of the disclosure has two XX or XY chromosomes and a third chromosome, either an X or a Y.

[0711] In some embodiments of the methods of the disclosure, a subject of the disclosure is a neonate, an infant, a child, an adult, a senior adult, or an elderly adult. In some embodiments of the methods of the disclosure, a subject of the disclosure is at least 1, 2, 3, 4, 5, 6, 7, 8, 9, 10, 11, 12, 13, 14, 15, 16, 17, 18, 19, 20, 21, 22, 23, 24, 25, 26, 27, 28, 29, 30 or 31 days old. In some embodiments of the methods of the disclosure, a subject of the disclosure is at least 1, 2, 3, 4, 5, 6, 7, 8, 9, 10, 11 or 12 months old. In some embodiments of the methods of the disclosure, a subject of the disclosure is at least 1, 2, 3, 4, 5, 6, 7, 8, 9, 10, 15, 20, 25, 30, 35, 40, 45, 50, 55, 60, 65, 70, 75, 80, 85, 90, 95, 100 or any number of years or partial years in between of age.

[0712] In some embodiments of the methods of the disclosure, a subject of the disclosure is a mammal. In some embodiments, a subject of the disclosure is a non-human mammal.

[0713] In some embodiments of the methods of the disclosure, a subject of the disclosure is a human.

[0714] In some embodiments of the methods of the disclosure, a therapeutically effective amount comprises a single dose of a composition of the disclosure. In some embodiments, a therapeutically effective amount comprises a therapeutically effective amount comprises at least one dose of a composition of the disclosure. In some embodiments, a therapeutically effective amount comprises a therapeutically effective amount comprises one or more dose(s) of a composition of the disclosure.

[0715] In some embodiments of the methods of the disclosure, a therapeutically effective amount eliminates a sign or symptom of the disease or disorder. In some embodiments, a therapeutically effective amount reduces a severity of a sign or symptom of the disease or disorder.

[0716] In some embodiments of the methods of the disclosure, a therapeutically effective amount eliminates the disease or disorder.

[0717] In some embodiments of the methods of the disclosure, a therapeutically effective amount prevents an onset of a disease or disorder. In some embodiments, a therapeutically effective amount delays the onset of a disease or disorder. In some embodiments, a therapeutically effective amount reduces the severity of a sign or symptom of the disease or disorder. In some embodiments, a therapeutically effective amount improves a prognosis for the subject.

[0718] In some embodiments of the methods of the disclosure, a composition of the disclosure is administered to the subject intramuscularly. In some embodiments, the composition of the disclosure is administered to the subject by an intravenous route. In some embodiments, the composition of the disclosure is administered to the subject by an injection or an infusion. In some embodiments, the composition is administered systemically. In some embodiments of the methods of the disclosure, a composition of the disclosure is administered to the subject locally.

[0719] In some embodiments, the compositions disclosed herein are formulated as pharmaceutical compositions. Briefly, pharmaceutical compositions for use as disclosed herein may comprise a protein(s) or a polynucleotide encoding the protein(s), optionally comprised in an AAV, which is optionally also immune orthogonal, in combination with one or more pharmaceutically or physiologically acceptable carriers, diluents or excipients. Such compositions may comprise buffers such as neutral buffered saline, phosphate buffered saline and the like; carbohydrates such as glucose, mannose, sucrose or dextrans, mannitol; proteins; polypeptides or amino acids such as glycine; antioxidants; chelating agents such as EDTA or glutathione; adjuvants (e.g., aluminum hydroxide); and preservatives. Compositions of the disclosure may be formulated for routes of administration, such as e.g., oral, enteral, topical, transdermal, intranasal, and/or inhalation; and for routes of administration via injection or infusion such as, e.g., intravenous, intramuscular, subpial, intrathecal, intrastriatal, subcutaneous, intradermal, intraperitoneal, intratumoral, intravenous, intraocular, and/or parenteral administration. In certain embodiments, the compositions of the present disclosure are formulated for intravenous administration.

### EXAMPLE EMBODIMENTS

[0720] Embodiment 1. A method of treating myotonic dystrophy type 1 (DM1) in a mammal comprising administering a composition to a toxic target CUG microsatellite repeat expansion (MRE) molecule in tissues of the mammal, wherein the composition comprises a nucleic acid sequence encoding a non-naturally occurring or engineered clustered regularly interspaced short palindromic repeats (CRISPR)-associated (Cas) system comprising: (a) at least one RNA-guided RNase Cas protein (or dCas protein); and (b) at least one cognate CRISPR-Cas system guide RNA (gRNA) capable of forming a complex with one of the at least one Cas proteins, wherein the gRNA comprises (i) a DR sequence and (ii) a spacer sequence, wherein the spacer sequence hybridizes with the target CUG MRE molecule, and whereby the complex formed by the composition directly targets and destroys or blocks the target CUG MRE molecule thereby treating DM1 in the mammal.

[0721] Embodiment 2: The method of any preceding embodiment, wherein the spacer sequence comprises a spacer sequence selected from the group consisting of: agcagcagcagcagcagcagcagcag (SEQ ID NO: 457), gcagcagcagcagcagcagcagcagc (SEQ ID NO: 458), and cagcagcagcagcagcagcagcagca (SEQ ID NO: 459).

[0722] Embodiment 3: The method of any preceding embodiment, wherein the composition is administered to the tissue of the mammal by intravenous administration.

[0723] Embodiment 4: The method of any preceding embodiment, wherein the RNA-guided RNase Cas protein is selected from the group consisting of Cas13a, Cas13b, Cas13c, Cas13d, and an RNA-binding portion thereof.

[0724] Embodiment 5: The method of any preceding embodiment, wherein the RNA-guided RNase Cas protein is Cas13d or an RNA-binding portion thereof.

[0725] Embodiment 6: The method of any preceding embodiment, wherein the RNA-guided RNase Cas protein which is deactivated (dCas).

[0726] Embodiment 7: The method of any preceding embodiment, wherein Cas13d is encoded by a nucleic acid sequence set forth in any one of SEQ ID NOs 522, 530, 535, 538, or 540.

[0727] Embodiment 8: The method of any preceding embodiment, wherein the dCas protein is linked to an endonuclease.

[0728] Embodiment 9: The method of any preceding embodiment, wherein the endonuclease is ZC3H12A zinc-finger endonuclease.

[0729] Embodiment 10: The method of any preceding embodiment, wherein the ZC3H12A zinc finger nuclease comprises the amino acid sequence set forth in SEQ ID NO: 358 or SEQ ID NO: 359.

[0730] Embodiment 11: A composition comprising a nucleic acid sequence encoding a non-naturally occurring or engineered clustered regularly interspaced short palindromic repeats (CRISPR)-associated (Cas) system comprising: (a) at least one RNA-guided RNase Cas protein; and b) at least one cognate CRISPR-Cas system guide RNA (gRNA) capable of forming a complex with one of the at least one Cas proteins, wherein the gRNA comprises (i) a DR sequence and (ii) a spacer sequence, wherein the spacer sequence hybridizes with the target CUG MRE molecule, and wherein the spacer sequence comprises a spacer sequence selected from the group consisting of: agcagcagcagcagcagcagcagcag (SEQ ID NO: 457), gcagcagcagcagcagcagcagcagc (SEQ ID NO: 458), and cagcagcagcagcagcagcagcagca (SEQ ID NO: 459), or a portion thereof.

[0731] Embodiment 12: An AAV vector comprising the composition of any preceding embodiment.

[0732] Embodiment 13: The AAV vector of any preceding embodiment, which is an AAV9 vector.

[0733] Embodiment 14: A method of treating myotonic dystrophy type 1 (DM1) in a mammal comprising administering a composition to a toxic target CUG microsatellite repeat expansion (MRE) molecule in tissues of the mammal, wherein the composition comprises a nucleic acid sequence encoding a non-guided RNA-binding fusion protein comprising a) a PUF or PUMBY RNA-binding sequence capable of binding a toxic target CUG RNA repeat sequence, wherein the toxic target CUG repeat sequence comprises UGCUGCUG (SEQ ID NO: 453), and b) an endonuclease capable of cleaving the toxic target CUG RNA repeat sequence, whereby the level of expression of the toxic target RNA is reduced.

[0734] Embodiment 15: The embodiment of any preceding embodiment, wherein administration of the composition is via intravenous administration.

[0735] Embodiment 16: A method of eliminating toxic CUG microsatellite repeat expansion (MRE) RNA in tissues of a mammal with DM1, comprising contacting a the CUG MRE RNA sequence with a composition under conditions suitable for binding of the composition to the CUG MRE RNA, wherein the composition comprises a nucleic acid sequence encoding a fusion protein comprising a) a PUF or PUMBY RNA-binding sequence capable of binding a toxic target sequence comprising UGCUGCUG (SEQ ID NO: 453) and b) an endonuclease capable of cleaving the toxic target RNA sequence, whereby the toxic target RNA is eliminated. In one embodiment, cleavage of the toxic target RNA thereby reduces the level of expression of the toxic target RNA. In another embodiment, reduction of the level of expression of the toxic target RNA thereby eliminates the toxic target RNA.

[0736] Embodiment 17: A composition comprising a nucleic acid sequence encoding a non-guided RNA-binding fusion protein comprising a) a PUF or PUMBY protein capable of binding capable of binding a toxic target sequence comprising UGCUGCUG (SEQ ID NO: 453) and b) an endonuclease capable of cleaving the toxic target RNA sequence.

[0737] Embodiment 18: An AAV vector comprises the composition of any preceding embodiment.

[0738] Embodiment 19: The AAV vector of any preceding embodiment wherein the vector is AAV9.

[0739] Embodiment 20: The method or composition of any preceding embodiment, wherein the endonuclease is selected from the group consisting of: RNase1, RNase4, RNase6, RNase7, RNase8, RNase2, RNase6PL, RNaseL, RNaseT2, RNase11, RNaseT2-like, NOB1, ENDOV, ENDOG, ENDOD1, hFEN1, hSLFN14, hLACTB2, APEX2, ANG, HRSP12, ZC3H12A, RIDA, PDL6, NTHL, KIAA0391, APEX1, AGO2, EXOG, ZC3H12D, ERN2, PELO, YBEY, CPSF4L, hCG_2002731, ERCC1, RAC1, RAA1, RAB1, DNA2, FLJ35220, FLJ13173, ERCC4, RNase1(K41R), RNase1(K41R, D121E), RNase1(K41R, D121E, H119N), RNase1(H119N), RNase1(R39D, N67D, N88A, G89D, R91D, H119N), RNase1(R39D, N67D, N88A, G89D, R91D, H119N, K41R, D121E), RNase1(R39D, N67D, N88A, G89D, R91D), TENM1, TENM2, RNaseK, TALEN, ZNF638, and hSMG6 (PIN). Embodiment XX: The method or composition of any preceding embodiment, wherein the endonuclease is

[0740] In some embodiments of the methods and compositions disclosed herein, the RNA-binding polypeptide is an RNA-guided RNase Cas protein. In some embodiments, the Cas protein is Cas13a, Cas13b, Cas13c, or Cas13d. In some embodiments, the Cas protein is Cas13d.

[0741] In some embodiments, the RNA-binding polypeptide is a non-guided RNA-binding polypeptide. In some embodiments, the non-guided RNA-binding polypeptide is a PUF protein, or a PUMBY protein. In some embodiments, the PUF or PUMBY protein is a human PUF or PUMBY protein. In some embodiments, the non-guided RNA-binding polypeptide is a PUF or PUMBY fusion protein. In one embodiment, a PUF or PUMBY-based first RNA-binding protein is fused to a second RNA-binding protein. In some embodiments the second RNA-binding protein is a nuclease domain of a zinc-finger endonuclease known as ZC3H12A of SEQ ID NO: 358 (also termed herein E17).

[0742] In some embodiments of the methods and compositions disclosed herein, the nucleic acid sequence comprises at least one promoter. In some embodiments, the at least one promoter is a constitutive promoter or a tissue-specific promoter. In one embodiment, the promoter is a CAG or truncated CAG (tCAG) promoter. In another embodiment, the promoter is an EFS promoter. In one embodiment, the tissue-specific promoter is a muscle-specific promoter. In another embodiment, the muscle-specific promoter is a MHCK7 promoter. In another embodiment, the muscle-specific promoter is a desmin promoter. In one embodiment, the desmin promoter is a full-length desmin promoter. In another embodiment, the desmin promoter is a truncated desmin promoter.

[0743] In some embodiments of the methods and compositions disclosed herein, the RNA-guided RNase Cas protein or the non-guided RNA-binding polypeptide is a first RNA-binding polypeptide which is fused with a second RNA-binding polypeptide. In one embodiment, the second RNA-binding polypeptide is capable of binding RNA in a manner in which it associates with RNA. In some embodiments, the second RNA-binding polypeptide is capable of associating with RNA in a manner in which it cleaves RNA. In some embodiments, the second RNA-binding polypeptide is selected from the group consisting of: RNase1, RNase4, RNase6, RNase7, RNase8, RNase2, RNase6PL, RNaseL, RNaseT2, RNase11, RNaseT2-like, NOB1, ENDOV, ENDOG, ENDOD1, hFEN1, hSLFN14, hLACTB2, APEX2, ANG, HRSP12, ZC3H12A, RIDA, PDL6, NTHL, KIAA0391, APEX1, AGO2, EXOG, ZC3H12D, ERN2, PELO, YBEY, CPSF4L, hCG_2002731, ERCC1, RAC1, RAA1, RAB1, DNA2, FLJ35220, FLJ13173, ERCC4, RNase1(K41R), RNase1(K41R, D121E), RNase1(K41R, D121E, H119N), RNase1(H119N), RNase1(R39D, N67D, N88A, G89D, R91D, H119N), RNase1(R39D, N67D, N88A, G89D, R91D, H119N, K41R, D121E), RNase1(R39D, N67D, N88A, G89D, R91D), TENM1, TENM2, RNaseK, TALEN, ZNF638, and hSMG6 (PIN). In one embodiment, the second RNA-binding polypeptide is a nuclease domain from ZC3H12A (E17). In some embodiments, the first RNA-binding protein is an RNA-guided RNase Cas protein which is deactivated.

[0744] In some embodiments disclosed herein is a vector comprising the CUG-targeting DM1 compositions disclosed herein. In some embodiments, the vector is selected from the group consisting of: adeno-associated virus, retrovirus, lentivirus, adenovirus, nanoparticle, micelle, liposome, lipoplex, polymersome, polyplex, and dendrimer. In one embodiment, an AAV vector comprises the CUG-targeting DM1 compositions disclosed herein. In one embodiment, the AAV vector is AAV9. In another embodiment, the AAV vector is AAVrh.74. In some embodiments disclosed herein is a cell comprising the vector or vectors disclosed herein.

[0745] In some embodiments of the compositions of the disclosure, the sequence comprising the gRNA further comprises a sequence encoding a promoter capable of expressing the gRNA in a eukaryotic cell.

[0746] In some embodiments of the compositions of the disclosure, the eukaryotic cell is an animal cell. In some embodiments, the animal cell is a mammalian cell. In some embodiments, the animal cell is a human cell. In some embodiments, the human cell is a muscle cell.

[0747] In some embodiments of the compositions of the disclosure, the promoter is a constitutively active promoter. In some embodiments, the promoter sequence is isolated or derived from a promoter capable of driving expression of an RNA polymerase. In some embodiments, the promoter sequence is a Pol III promoter. In some embodiments, the promoter sequence is isolated or derived from a human U6 promoter. In some embodiments, the promoter is a sequence isolated or derived from a promoter capable of driving expression of a transfer RNA (tRNA). In some embodiments, the promoter is isolated or derived from an alanine tRNA promoter, an arginine tRNA promoter, an asparagine tRNA promoter, an aspartic acid tRNA promoter, a cysteine tRNA promoter, a glutamine tRNA promoter, a glutamic acid tRNA promoter, a glycine tRNA promoter, a histidine tRNA promoter, an isoleucine tRNA promoter, a leucine tRNA promoter, a lysine tRNA promoter, a methionine tRNA promoter, a phenylalanine tRNA promoter, a proline tRNA promoter, a serine tRNA promoter, a threonine tRNA promoter, a tryptophan tRNA promoter, a tyrosine tRNA promoter, or a valine tRNA promoter. In some embodiments, the promoter is isolated or derived from a valine tRNA promoter.

[0748] In some embodiments of the compositions of the disclosure, the DR sequence of the gRNA is a Cas13d DR sequence.

[0749] In some embodiments of the compositions of the disclosure, the first RNA binding protein comprises a CRISPR-Cas protein which is not a Cas9 CRISPR-Cas protein. In some embodiments, the CRISPR-Cas protein comprises a native RNA nuclease activity. In some embodiments, the native RNA nuclease activity is reduced or inhibited. In some embodiments, the native RNA nuclease activity is increased or induced. In some embodiments, the CRISPR-Cas protein and/or the cognate gRNA comprises a mutation. In some embodiments, a nuclease domain of the CRISPR-Cas protein comprises the mutation. In some embodiments, the DR sequence of the gRNA comprises the mutation. In some embodiments, the mutation occurs in a nucleic acid encoding the CRISPR-Cas protein or the nucleic acid encoding the gRNA. In some embodiments, the mutation occurs in an amino acid encoding the CRISPR-Cas protein. In some embodiments, the mutation comprises a substitution, an insertion, a deletion, a frameshift, an inversion, or a transposition. In some embodiments, the mutation comprises a deletion of a nuclease domain, a binding site within the nuclease domain, an active site within the nuclease domain, or at least one essential amino acid residue within the nuclease domain. In some embodiments, the mutation is a point mutation in the DR sequence of the gRNA.

[0750] In some embodiments, the CRISPR-Cas protein is a Type VI CRISPR-Cas protein. In some embodiments, the RNA binding protein comprises a Cas13 polypeptide or an RNA-binding portion thereof In some embodiments, the RNA binding protein comprises a Cas13d polypeptide or an RNA-binding portion thereof In some embodiments, the CRISPR-Cas protein comprises a native RNA nuclease activity. In some embodiments, the native RNA nuclease activity is reduced or inhibited. In some embodiments, the native RNA nuclease activity is increased or induced. In some embodiments, the CRISPR-Cas protein and/or its cognate gRNA comprises a mutation. In some embodiments, a nuclease domain of the CRISPR-Cas protein comprises the mutation. In some embodiments, the mutation occurs in a nucleic acid encoding the CRISPR-Cas protein or in the nuclei acid encoding the gRNA. In some embodiments, the mutation occurs in an amino acid sequence of the CRISPR-Cas protein. In some embodiments, the mutation comprises a substitution, an insertion, a deletion, a frameshift, an inversion, or a transposition. In some embodiments, the mutation comprises a deletion of a nuclease domain, a binding site within the nuclease domain, an active site within the nuclease domain, or at least one essential amino acid residue within the nuclease domain. In some embodiments, the mutation is a point mutation in the DR sequence of the gRNA. In one embodiment, the mutated DR sequence is a Cas13d DR sequence comprising a point mutation.

[0751] In some embodiments of the methods and/or compositions of the disclosure, the non-guided RNA binding protein does not require multimerization for RNA-binding activity. In some embodiments, the non-guided RNA binding protein is not a monomer of a multimer complex. In some embodiments, a multimer protein complex does not comprise the RNA binding protein.

[0752] In some embodiments of the methods and/or compositions of the disclosure, the RNA binding protein selectively binds to a target sequence within the RNA molecule. In some embodiments, the RNA binding protein does not comprise an affinity for a second sequence within the RNA molecule. In some embodiments, the RNA binding protein does not comprise a high affinity for or selectively binds a second sequence within the RNA molecule.

[0753] In some embodiments of the methods and/or compositions of the disclosure, an RNA genome or an RNA transcriptome comprises the RNA molecule.

[0754] In some embodiments of the methods and/or compositions of the disclosure, the RNA binding protein comprises between 2 and 1300 amino acids, inclusive of the endpoints.

[0755] In some embodiments of the methods and/or compositions of the disclosure, the RNA binding fusion protein comprises between 2 and 2000 amino acids, inclusive of the endpoints.

[0756] In some embodiments of the methods and/or compositions of the disclosure, the sequence encoding the RNA binding protein further comprises a sequence encoding nuclear localization signal (NLS), a nuclear export signal (NES) or tag. In some embodiments, the sequence encoding a nuclear localization signal (NLS) is positioned at the N-terminus of the sequence encoding the RNA binding protein. In some embodiments, the RNA binding protein comprises an NLS at a C-terminus of the protein. In some embodiments, the sequence encoding the RNA binding protein or system comprises two NLSs or two NESs.

[0757] In some embodiments of the methods and/or compositions of the disclosure, the sequence encoding the RNA binding protein further comprises a first sequence encoding a first NLS and a second sequence encoding a second NLS. In some embodiments, the sequence encoding the first NLS or the second NLS is positioned at the N-terminus of the sequence encoding the RNA binding protein. In some embodiments, the RNA binding protein comprises the first NLS or the second NLS at a C-terminus of the protein. In some embodiments, the RNA-binding compositions comprise at least one linker.

[0758] In some embodiments of the methods and/or compositions of the disclosure, the composition further comprises a second RNA binding protein. In some embodiments, the second RNA binding protein comprises or consists of a nuclease domain. In some embodiments, the second RNA binding protein binds RNA in a manner in which it associates with RNA. In some embodiments, the second RNA binding protein associates with RNA in a manner in which it cleaves RNA. In some embodiments of the compositions of the disclosure, the sequence encoding the second RNA binding protein comprises or consists of an RNase.

[0759] Also disclosed herein are methods of manufacture of the compositions and/or vectors comprising the compositions disclosed herein.

[0760] Any of the preceding embodiments, wherein the nucleic acid sequence comprises at least one promoter, wherein the at least one promoter is a constitutive promoter or a tissue-specific promoter. wherein the at least one promoter is an EFS promoter or a tCAG promoter, wherein the tissue-specific promoter is a muscle-specific promoter, wherein the muscle-specific promoter is a MHCK7 promoter, and/or wherein any of the preceding promoters comprise an enhancer and/or an intron.

[0761] Any of the preceding embodiments, wherein the level of expression of the toxic target RNA is reduced compared to the reduction in the level of expression of the untreated toxic target RNA, wherein the level of expression of the toxic target RNA is reduced compared to the level of reduction of the toxic target RNA treated with RCas9-based systems, wherein the level of reduction is 1-fold or greater, wherein the level of reduction is 2-fold, 3-fold, 4-fold, 5-fold, 6-fold, 7-fold, 8-fold, 9-fold or 10-fold, wherein the level of reduction is 10-fold or greater, wherein the level of reduction is between 10-fold and 20-fold.

[0762] The methods and compositions of any of the preceding embodiments, wherein the nucleic acid sequence comprising a promoter capable of expressing the gRNA in a human cell, wherein the promoter is a human U6 promoter, wherein the promoter is a sequence isolated or derived from a promoter capable of driving expression of a transfer RNA (tRNA), wherein the promoter is selected from the group consisting of an alanine tRNA promoter, an arginine tRNA promoter, an asparagine tRNA promoter, an aspartic acid tRNA promoter, a cysteine tRNA promoter, a glutamine tRNA promoter, a glutamic acid tRNA promoter, a glycine tRNA promoter, a histidine tRNA promoter, an isoleucine tRNA promoter, a leucine tRNA promoter, a lysine tRNA promoter, a methionine tRNA promoter, a phenylalanine tRNA promoter, a proline tRNA promoter, a serine tRNA promoter, a threonine tRNA promoter, a tryptophan tRNA promoter, a tyrosine tRNA promoter, and a valine tRNA promoter. wherein the DR sequence of the gRNA is a Cas13d DR sequence, wherein the nucleic acid sequence further comprises a sequence encoding at least one nuclear localization signal (NLS), nuclear export signal (NES) or tag, wherein the at least one nuclear localization signal (NLS) is positioned at the N-terminus of the sequence encoding the RNA binding protein, wherein the at least one nuclear localization signal (NLS) is positioned at the C-terminus of the sequence encoding the RNA binding protein, wherein the nucleic acid sequence further comprises a sequence encoding two nuclear localization signals (NLSs) or two nuclear export signal (NESs), wherein the RNA-binding protein or fusion protein comprises at least one linker.

### EXAMPLES

### Example 1: Cas13d Systems Destroy DM1 Toxic CUG Repeats

### Materials

[0763] Plasmids: CTG960 (960 CTG repeats), Tet transactivator, pcDNA3.1 expressing Cas and sgRNA under human U6 promoter

[0764] Transfection reagents: Lipofectamine 3000, opti-MEM, PBS, DMEM

[0765] RNA extraction kit: RNEASY PLUS (Qiagen)

[0766] qScript™ One-Step SYBR@ Green qRT-PCR Kit, Quantabio

### Methods

[0767] Transfection, RNA Extraction, RNA-FISH, and qRT-PCR Analysis

[0768] To assess the knockdown of CUG repeat containing RNA, 5×10⁴ COSM6 cells were seeded on 24 well plates and transfected with 50 ng of the DMPK-CTG960 plasmid where CUG-960 expression is driven under the control of the tetracycline regulatable promoter element (TRE), 25 ng of Tet transactivator (tTA) plasmid, and 1 μg of the RBP (Cas+sgRNA). Spacer sequences used in sgRNAs for CUG targeting with Cas13d systems are listed in Table T. Cas proteins and corresponding sgRNAs were expressed from the same plasmid. Cells were incubated with 100 ng/ml doxycycline in Opti-MEM (containing 5% FBS) overnight which is required to drive the expression of the CUG-960 RNA. Cells were washed with PBS and incubated in complete DMEM media supplemented with 100 ng/ml doxycycline for additional 24 hours. Cells were harvested, RNA was extracted, and qRT-PCR was performed. CUG expression ΔΔCT was calculated normalized to housekeeping gene and relative to non-targeting (NT) sgRNA to quantify the CUG-960 knockdown.

TABLE 51
Spacers sequences used in sgRNAs for
CUG targeting with Cas13d systems:

| Spacer | Spacer Sequences |
|---|---|
| 1 | agcagcagcagcagcagcagcagcag |
| | (SEQ ID NO: 457) |
| 2 | gcagcagcagcagcagcagcagcagc |
| | (SEQ ID NO: 458) |
| 3 | cagcagcagcagcagcagcagcagca |
| | (SEQ ID NO:459) |

[0769] FIG. 1 demonstrates that CUG-targeting Cas13d systems utilizing spacer sequences SEQ ID NOs 457-459 eliminate >90% of CUG targets compared to control.

[0770] FIG. 2 demonstrates that CUG-targeting Cas13d systems eliminate >90% of CUG-repeat RNA compared to control as analyzed by RNA fluorescence in situ hybridization (RNA-FISH).

[0771] FIG. 3 shows Cas13d systems compared to RCas9 systems. Cas13d systems result in efficient cleavage eliminating >90% of CUG targets compared to control NT sgRNA. Cells treated with RCas9 exhibited about 80% knockdown of the target CUG repeats.

### Example 2: PUF Systems Destroy DM1 Toxic CUG Repeats

### Materials

[0772] Plasmids: CTG960 (960 CTG repeats), Tet transactivator, pcDNA3.1 expressing RBP

[0773] Transfection reagents: Lipofectamine 3000, opti-MEM, PBS, DMEM

[0774] RNA extraction kit: RNEASY PLUS (Qiagen)

[0775] qScript™ One-Step SYBR@ Green qRT-PCR Kit, Quantabio Methods Transfection, RNA extraction, FISH, and qRT-PCR Analysis

[0776] To assess the knockdown of CUG repeat containing RNA, 5×10⁴ COSM6 cells were seeded on 24 well plates and transfected with 50 ng of the DMPK-CTG960 plasmid where CUG-960 expression is driven under the control of the tetracycline regulatable promoter element (TRE), 25 ng of Tet transactivator (tTA) plasmid, and 1 μg of the RBP (PUFs). Cells were incubated with 100 ng/ml doxycycline in Opti-MEM (containing 5% FBS) overnight. Cells were washed with PBS and incubated in complete DMEM media supplemented with 100 ng/ml doxycycline for additional 24 hours. Cells were harvested, RNA was extracted, and qRT-PCR was performed. CUG expression ΔΔCT was calculated normalized to housekeeping gene and relative to non-targeting (NT) control to quantify CUG960 RNA knockdown.

[0777] The PUF constructs (labeled in FIG. 1 as CUG-f1 and CUG-f2) targeted the toxic sequence UGCUGCUG (SEQ ID NO: 453).

[0778] FIG. 1 demonstrates that CUG-targeting PUF-E17 fusion systems eliminate >90% of CUG targets compared to control.

[0779] FIG. 2 demonstrates that PUF(CUG)-E17 fusion systems eliminate >90% of CUG-repeat RNA compared to control as analyzed by RNA fluorescence in situ hybridization (RNA-FISH).

[0780] FIG. 3 shows PUF(CUG) systems compared to RCas9 systems. PUF(CUG) systems result in efficient cleavage eliminating >90% of CUG targets compared to control NT. Cells treated with RCas9 exhibited about 80% knockdown of the target CUG repeats.

### Example 3: Targeting Expanded CUG Repeats at the RNA Level for the Treatment of Myotonic Dystrophy Type 1 (Destruction and Blocking Mechanisms)

[0781] RNA-targeting compositions disclosed herein A01215 (Cas13d(CUG) for destruction), A01344 (PUF(CUG)-E17 for destruction), and A01686 (for blocking) were delivered via either systemic or intramuscular routes via AAV-based approaches. For example, the PUF targeting CUG construct for AAV9-based delivery in the below art-recognized animal model for myotonic dystrophy is presented in Table 53.

TABLE 53
PUF targeting CUG construct
for AAV9-based delivery

| Protein | | Target | Amino Acid |
|---|---|---|---|
| Type | Elements | Sequence | Sequence of PUF |
| 8PUF | N-terminal | UGCUGCUG | GRSRLLEDFRNNRYP |
| | SV40 NLS; | (SEQ ID | NLQLREIAGHIMEFS |
| | Linker | NO: 453) | QDQHGSRFIELKLER |
| | between | | ATPAERQLVFNEILQ |
| | PUF and | | AAYQLMVDVFGNYVI |
| | E17 | | QKFFEFGSLEQKLAL |
| | endo- | | AERIRGHVLSLALQM |
| | nuclease | | YGSYVIRKALEFIPS |
| | (VDTANGS); | | DQQNEMVRELDGHVL |
| | C-terminal | | KCVKDQNGSYVVEKC |
| | E17 | | IECVQPQSLQFIIDA |
| | | | FKGQVFALSTHPYGN |
| | | | RVIQRILEHCLPDQT |
| | | | LPILEELHQHTEQL |
| | | | VQDQYGSYVIRHVLE |
| | | | HGRPEDKSKIVAEIR |
| | | | GNVLVLSQHKFASNV |
| | | | VEKCVTHASRTERAV |
| | | | LIDEVCTMNDGPHSA |
| | | | LYTMMKDQYANYVVQ |
| | | | KMIDVAEPGQRKIVM |
| | | | HKIRPHIATLRKYTY |
| | | | GKHILAKLEKYYMKN |
| | | | GVDLG |
| | | | (SEQ ID NO: 444) |

[0782] In order to target expanded CUG repeats associated with myotonic dystrophy, vector with DNA encoding CUG-targeting compositions were delivered by an AAV vector. PUF(CUG)-E17, Cas13d(CUG) or PUF(CUG) alone expression was driven by a promoter (FIG. 4A-C and FIG. 12 A-B). In some aspects, a truncated CAG (tCAG) promoter (SEQ ID NO: 385) was used. In some aspects, a short EF1-alpha (EFS) promoter (SEQ ID NO: 520) was used. In some aspects, an EFS promoter with a UBB intron (SEQ ID NO: 609) was used.

[0783] AAV-9 preparations were generated according to standard techniques (triple-transfection method) and purified by IDX gradient ultracentrifugation. AAV was titered by qPCR and capsid ELISA. The AAV9 version described above was next injected either intravenously (150 μL total volume, 1*10\hat{ }12 vg) or to the tibialis anterior muscles of HSA-LR myotonic dystrophy type 1 mice (50 μL total volume, 2*10\hat{ }10 vg, 1*10\hat{ }11 vg) and subjected to daily clinical observation subsequently. Mice were sacrificed at 4w and 12w after injection. For each animal, the proximal halves of the tibialis anterior (injection site for IM injection), quadriceps, diaphragm, gastrocnemius muscles, heart, spleen, liver (representative portion, i.e., piece of a lobe), intestines and kidneys were collected, placed individually (except pair organs) into cryovials and flash frozen in liquid nitrogen for RNA/protein assessment and changes in gene expressions. The other halves of all the tissues were embedded in OCT and frozen. The muscle sections were cut in a transverse fashion. The other half of the tissues was used to prepare total RNA.

[0784] Electromyography was performed prior to sacrificing mice at 4 and 12 weeks timepoints to assess the reversal of disease-associated myotonia (defect in muscle relaxation) as a measure of efficacy of the RNA targeting compositions in reversing myotonic dystrophy type 1 physiological phenotypes.

[0785] RNA isolations from frozen tissue were carried out with RNAeasy columns (Qiagen) according to the manufacturer's protocol. RNA quality and concentrations were estimated using the Nanodrop spectrophotometer. cDNA preparation was done using Superscript III (Thermofisher) with random primers according to the manufacturer's protocol. qPCR and digital droplet PCR (ddPCR) were carried out to assess the levels of the RNA-targeting compositions in tissue among the two mouse groups (RNA-targeting compositions, Vehicle) and to assess durability of transgene expression.

[0786] RNA Fluorescence in-situ hybridization (FISH) was performed to measure the disappearance of RNA foci in the muscle sections as a measure of efficacy of the RNA-targeting compositions in eliminating or blocking expanded CUG repeats.

[0787] Immunofluorescence with antibodies against the chloride channel Clcn1 and Mbnl1 was performed as a measure of efficacy of the RNA-targeting compositions for the treatment of myotonic dystrophy type 1 molecular pathology. Reconstitution of Clcn1 and Redistribution of nuclear Mbnl1 signified reversal myotonic dystrophy type 1 molecular pathology.

[0788] cDNA was prepared from the RNA isolated from muscle tissue. RT-PCR is performed with primers flanking the alternatively spliced exon 22 of Atp2al, exon 7 of Clcn1, exon 11 of BIN1 to show reversal of myotonic dystrophy type 1 associated alternative splicing.

### Example 4: Targeting Expanded CUG Repeats at the RNA Level for the Treatment of Myotonic Dystrophy Type 1 by dCas13d and a CUG-Targeting Guide RNA

[0789] A single transgene encoding CUG-targeting guide RNA (gRNA) under the human U6 promoter and a nuclease-dead dCas13d linked to the endonuclease E17 (derived from human ZC3H112A gene) or a nuclease-dead dCas13d (alone) is delivered via either systemic or intramuscular routes via viral or nonviral means. In order to target expanded CUG repeats associated with myotonic dystrophy, vectors with DNA encoding CUG-targeting gRNA and dCas13d(CUG) is delivered by an AAV vector. Cas13d (or dCas13d) expression is driven by a promoter (FIG. 4B, FIG. 4C and FIG. 12B). In some aspects, a truncated CAG (tCAG) promoter (SEQ ID NO: 385) was used. In some aspects, a short EF1-alpha (EFS) promoter (SEQ ID NO: 520) was used. In some aspects, an EFS promoter with a UBB intron (SEQ ID NO: 609) was used.

[0790] AAV9 preparations were generated according to standard techniques (triple-transfection method) and purified by IDX gradient ultracentrifugation. AAV was titered by qPCR and capsid ELISA. The AAV9 version described above is next injected into the either intravenously (150 μL total volume, 1*10\hat{ }12 vg) or to the tibialis anterior muscles of HSA-LR myotonic dystrophy type 1 mice (50 μL total volume, 2*10\hat{ }vg, 1*10\hat{ }11 vg vg) and subjected to daily clinical observation subsequently. Mice are sacrificed at 4w and 12w after injection. For each animal, the proximal halves of the tibialis anterior (injection site for IM injection), quadriceps, diaphragm, gastrocnemius muscles, heart, spleen, liver (representative portion, i.e., piece of a lobe), intestines and kidneys are collected, placed individually (except pair organs) into cryovials and flash frozen in liquid nitrogen for RNA/protein assessment and changes in gene expressions. The other halves of all the tissues are embedded in OCT and frozen. The muscle sections are cut in a transverse fashion. The other half of the tissues is used to prepare total RNA.

[0791] Electromyography is performed prior to sacrificing mice at 4 and 12 weeks timepoints to assess the reversal of disease-associated myotonia (defect in muscle relaxation) as a measure of efficacy of the dCas13d(CUG)-E17 via destruction or dCas13d(CUG) via blocking in reversing myotonic dystrophy type 1 physiological phenotypes. RNA isolations from frozen tissue is carried out with RNAeasy columns (Qiagen) according to the manufacturer's protocol. RNA quality and concentrations are estimated using the Nanodrop spectrophotometer. cDNA preparation is done using Superscript III (Thermofisher) with random primers according to the manufacturer's protocol. qPCR and digital droplet PCR (ddPCR) are carried out to assess the levels of Cas13d (or dCas13d) and gRNA in tissue among the two mouse groups (CUG targeting RNA along with Cas13d or dCas13d, Vehicle) to assess durability of transgene expression. RNA Fluorescence in-situ hybridization (FISH) is performed to measure the disappearance of RNA foci in the muscle sections as a measure of efficacy of CUG-targeting gRNA+Cas13d (or dCas13d) in eliminating expanded CUG repeats. Immunofluorescence with antibodies against the chloride channel Clcn1 and Mbnl1 is performed as a measure of efficacy of gRNA+Cas13d (or dCas13d) for the treatment of myotonic dystrophy type 1 molecular pathology. Reconstitution of Clcn1 and Redistribution of nuclear Mbnl1 signifies reversal myotonic dystrophy type 1 molecular pathology. cDNA is prepared from the RNA isolated from muscle tissue. RT-PCR is performed with primers flanking the alternatively spliced exon 22 of Atp2al, exon 7 of Clcn1, exon 11 of BIN1 to show reversal of myotonic dystrophy type 1 associated alternative splicing.

### Example 5: Dose-Dependent Reduction in CUG^{exp} RNA Via Destruction or Blocking in Patient Myocytes and HSA DM1 Mice (Described Above)

[0792] Myotonic dystrophy type I (DM1) is a multisystemic autosomal-dominant inherited disorder caused by CUG microsatellite repeat expansions (MREs) in the 3′ untranslated region (UTR) of the DMPK mRNA. Previously, we showed that a CRISPR/Cas9-based RNA-targeting gene therapy has the potential to eliminate toxic RNAs expressed from repetitive tracts in DM1 in primary patient cells and a DM1 mouse model. To further explore therapeutic MRE targeting strategies which are less wieldy and better suited to lower or eliminate off-target effects, we engineered RNA-targeting systems: 1) a novel CRISPR/Cas13d (A01215), 2) a PUF RNA binding protein system derived from the naturally occurring human PUM1 protein linked with an RNA endonuclease (PUF-E17) derived from human ZC3H112A (A01344), and 3) a PUF RNA binding protein system without an endonuclease (A01686) to target and either cleave (1 & 2) or block expanded DM1-related CUG repeats. Modified AAvrh74-packaged Cas13d and PUF-E17 reduced nuclear CUG RNA foci in DM1 patient myocytes in a dose dependent fashion. Further, unitary AAV9-packaged Cas13d, PUF-E17 and PUF (blocking) were separately delivered via intramuscular (IM) and intravenous (IV) injections to adult (8-12 weeks old) HSA_{LR} DM1 mice. We report dose-dependent transgene expression, correction of DM1-associated alternative splicing and reduction in myotonia with electromyography at 4 weeks post IM injection with all RNA targeting systems. As expected, reduction in RNA foci and improvements in splicing with Cas13d and PUF-E17 were accompanied by reduction in CUG RNA levels (>50%). In summary, we show different mechanistic approaches (destruction and blocking) that can effectively target the MRE in DMPK and improve molecular and clinical features of DM1. FIGS. 6-12.

### Example 6: Tolerability and Transgene Expression in NHP Studies

[0793] Non-human primate (NHP) studies with AAV9 encoding the RNA-targeting compositions described above (A01215, A01344, and A01686) under control of a muscle (skeletal, smooth, and cardiac) specific promoter to assess tolerability and transgene expression levels in target tissues (biodistribution) are being carried out. The RNA-targeting compositions. Vector with DNA encoding CUG-targeting compositions were delivered by an AAV9 vector. PUF(CUG)-E17, Cas13d(CUG) or PUF(CUG) alone expression is driven by a promoter (FIG. 4A-C and FIG. 12 A-B). In some aspects, a desmin promoter (full-length desmin SEQ ID NO: 568 or truncated desmin SEQ ID NO: 569) is used.

### INCORPORATION BY REFERENCE

[0794] Every document cited herein, including any cross referenced or related patent or application is hereby incorporated herein by reference in its entirety unless expressly excluded or otherwise limited. The citation of any document is not an admission that it is prior art with respect to any invention disclosed or embodiment herein or that it alone, or in any combination with any other reference or references, teaches, suggests or discloses any such invention. Further, to the extent that any meaning or definition of a term in this document conflicts with any meaning or definition of the same term in a document incorporated by reference, the meaning or definition assigned to that term in this document shall govern.

### OTHER EMBODIMENTS

[0795] While particular embodiments of the disclosure have been illustrated and described, various other changes and modifications can be made without departing from the spirit and scope of the disclosure. The scope of the appended claims includes all such changes and modifications that are within the scope of this disclosure.

The application's sequence listing, which the Patent Office published only in electronic form, follows.

SEQUENCE LISTING (651 sequences)

SEQ ID NO: 1 - protein, 954 aa, Artificial Sequence
  Eubacterium siraeum nCas1
MGKKIHARDLREQRKTDRTEKFADQNKKREAERAVPKKDAAVSVKSVSSVSSKKDNVTKSMAKAAGVKSVFAVGNTVYMTSFGRGNDAVLEQKIVDTSHEPLNIDDPAYQLNVVTMNGYSVTGHRGETVSAVTDNPLRRFNGRKKDEPEQSVPTDMLCLKPTLEKKFFGKEFDDNIHIQLIYNILDIEKILAVYSTNAIYALNNMSADENIENSDFFMKRTTDETFDDFEKKKESTNSREKADFDAFEKFIGNYRLAYFADAFYVNKKNPKGKAKNVLREDKELYSVLTLIGKLRHWCVHSEEGRAEFWLYKLDELKDDFKNVLDVVYNRPVEEINNRFIENNKVNIQILGSVYKNTDIAELVRSYYEFLITKKYKNMGFSIKKLRESMLEGKGYADKEYDSVRNKLYQMTDFILYTGYINEDSDRADDLVNTLRSSLKEDDKTTVYCKEADYLWKKYRESIREVADALDGDNIKKLSKSNIEIQEDKLRKCFISYADSVSEFTKLIYLLTRFLSGKEINDLVTTLINKFDNIRSFLEIMDELGLDRTFTAEYSFFEGSTKYLAELVELNSFVKSCSFDINAKRTMYRDALDILGIESDKTEEDIEKMIDNILQIDANGDKKLKKNNGLRNFIASNVIDSNRFKYLVRYGNPKKIRETAKCKPAVRFVLNEIPDAQIERYYEACCPKNTALCSANKRREKLADMIAEIKFENFSDAGNYQKANVTSRTSEAEIKRKNQAIIRLYLTVMYIMLKNLVNVNARYVIAFHCVERDTKLYAESGLEVGNIEKNKTNLTMAVMGVKLENGIIKTEFDKSFAENAANRYLRNARWYKLILDNLKKSERAVVNEFRNTVCHLNAIRNININIKEIKEVENYFALYHYLIQKHLENRFADKKVERDTGDFISKLEEHKTYCKDFVKAYCTPFGYNLVRYKNLTIDGLFDKNYPGKDDSDEQK

SEQ ID NO: 2 - protein, 954 aa, Artificial Sequence
  Eubacterium siraeum nCas1 HEPN-/-
MGKKIHARDLREQRKTDRTEKFADQNKKREAERAVPKKDAAVSVKSVSSVSSKKDNVTKSMAKAAGVKSVFAVGNTVYMTSFGRGNDAVLEQKIVDTSHEPLNIDDPAYQLNVVTMNGYSVTGHRGETVSAVTDNPLRRFNGRKKDEPEQSVPTDMLCLKPTLEKKFFGKEFDDNIHIQLIYNILDIEKILAVYSTNAIYALNNMSADENIENSDFFMKRTTDETFDDFEKKKESTNSREKADFDAFEKFIGNYRLAYFADAFYVNKKNPKGKAKNVLREDKELYSVLTLIGKLAHWCVASEEGRAEFWLYKLDELKDDFKNVLDVVYNRPVEEINNRFIENNKVNIQILGSVYKNTDIAELVRSYYEFLITKKYKNMGFSIKKLRESMLEGKGYADKEYDSVRNKLYQMTDFILYTGYINEDSDRADDLVNTLRSSLKEDDKTTVYCKEADYLWKKYRESIREVADALDGDNIKKLSKSNIEIQEDKLRKCFISYADSVSEFTKLIYLLTRFLSGKEINDLVTTLINKFDNIRSFLEIMDELGLDRTFTAEYSFFEGSTKYLAELVELNSFVKSCSFDINAKRTMYRDALDILGIESDKTEEDIEKMIDNILQIDANGDKKLKKNNGLRNFIASNVIDSNRFKYLVRYGNPKKIRETAKCKPAVRFVLNEIPDAQIERYYEACCPKNTALCSANKRREKLADMIAEIKFENFSDAGNYQKANVTSRTSEAEIKRKNQAIIRLYLTVMYIMLKNLVNVNARYVIAFHCVERDTKLYAESGLEVGNIEKNKTNLTMAVMGVKLENGIIKTEFDKSFAENAANRYLRNARWYKLILDNLKKSERAVVNEFANTVCALNAIRNININIKEIKEVENYFALYHYLIQKHLENRFADKKVERDTGDFISKLEEHKTYCKDFVKAYCTPFGYNLVRYKNLTIDGLFDKNYPGKDDSDEQK

SEQ ID NO: 3 - protein, 919 aa, Artificial Sequence
  Uncultured Ruminococcus sp. nCas1
MAKKNKMKPRELREAQKKARQLKAAEINNNAAPAIAAMPAAEVIAPAAEKKKSSVKAAGMKSILVSENKMYITSFGKGNSAVLEYEVDNNDYNQTQLSSKDNSNIQLGGVNEVNITFSSKHGFESGVEINTSNPTHRSGESSPVRGDMLGLKSELEKRFFGKTFDDNIHIQLIYNILDIEKILAVYVTNIVYALNNMLGVKGSESHDDFIGYLSTNNIYDVFIDPDNSSLSDDKKANVRKSLSKFNALLKTKRLGYFGLEEPKTKDNRVSQAYKKRVYHMLAIVGQIRQCVFHDKSGAKRFDLYSFINNIDPEYRDTLDYLVEERLKSINKDFIEDNKVNISLLIDMMKGYEADDIIRLYYDFIVLKSQKNLGFSIKKLREKMLDEYGFRFKDKQYDSVRSKMYKLMDFLLFCNYYRNDIAAGESLVRKLRFSMTDDEKEGIYADEAAKLWGKFRNDFENIADHMNGDVIKELGKADMDFDEKILDSEKKNASDLLYFSKMIYMLTYFLDGKEINDLLTTLISKFDNIKEFLKIMKSSAVDVECELTAGYKLFNDSQRITNELFIVKNIASMRKPAASAKLTMFRDALTILGIDDKITDDRISGILKLKEKGKGIHGLRNFITNNVIESSRFVYLIKYANAQKIREVAKNEKVVMFVLGGIPDTQIERYYKSCVEFPDMNSSLGVKRSELARMIKNISFDDFKNVKQQAKGRENVAKERAKAVIGLYLTVMYLLVKNLVNVNARYVIAIHCLERDFGLYKEIIPELASKNLKNDYRILSQTLCELCDKSPNLFLKKNERLRKCVEVDINNADSSMTRKYRNCIAHLTVVRELKEYIGDICTVDSYFSIYHYVMQRCITKRENDTKQEEKIKYEDDLLKNHGYTKDFVKALNSPFGYNIPRFKNLSIEQLFDRNEYLTEK

SEQ ID NO: 4 - protein, 919 aa, Artificial Sequence
  Uncultured Ruminococcus sp. nCas1 HEPN-/-
MAKKNKMKPRELREAQKKARQLKAAEINNNAAPAIAAMPAAEVIAPAAEKKKSSVKAAGMKSILVSENKMYITSFGKGNSAVLEYEVDNNDYNQTQLSSKDNSNIQLGGVNEVNITFSSKHGFESGVEINTSNPTHRSGESSPVRGDMLGLKSELEKRFFGKTFDDNIHIQLIYNILDIEKILAVYVTNIVYALNNMLGVKGSESHDDFIGYLSTNNIYDVFIDPDNSSLSDDKKANVRKSLSKFNALLKTKRLGYFGLEEPKTKDNRVSQAYKKRVYHMLAIVGQIAQCVFADKSGAKRFDLYSFINNIDPEYRDTLDYLVEERLKSINKDFIEDNKVNISLLIDMMKGYEADDIIRLYYDFIVLKSQKNLGFSIKKLREKMLDEYGFRFKDKQYDSVRSKMYKLMDFLLFCNYYRNDIAAGESLVRKLRFSMTDDEKEGIYADEAAKLWGKFRNDFENIADHMNGDVIKELGKADMDFDEKILDSEKKNASDLLYFSKMIYMLTYFLDGKEINDLLTTLISKFDNIKEFLKIMKSSAVDVECELTAGYKLFNDSQRITNELFIVKNIASMRKPAASAKLTMFRDALTILGIDDKITDDRISGILKLKEKGKGIHGLRNFITNNVIESSRFVYLIKYANAQKIREVAKNEKVVMFVLGGIPDTQIERYYKSCVEFPDMNSSLGVKRSELARMIKNISFDDFKNVKQQAKGRENVAKERAKAVIGLYLTVMYLLVKNLVNVNARYVIAIHCLERDFGLYKEIIPELASKNLKNDYRILSQTLCELCDKSPNLFLKKNERLRKCVEVDINNADSSMTRKYANCIAALTVVRELKEYIGDICTVDSYFSIYHYVMQRCITKRENDTKQEEKIKYEDDLLKNHGYTKDFVKALNSPFGYNIPRFKNLSIEQLFDRNEYLTEK

SEQ ID NO: 5 - protein, 408 aa, Artificial Sequence
  Gut_metagenome_contig2791000549
MKQNDRENNNKIKKSAAKAVGVKSLARLSDGSTVVSSFGKGAAAELESLITGGEIRKLSDKAILEITDDTQNKNAYNVKSSRIPNLTARTDKLSDKSGMDDLGFKRELELEVFGQCFDDSIHIQIAHAVFDIQKSLAAVIPNVLYTLNNLDRSYSTDNTSDKKDIIGNTLNYQHSYESFNVEKRGEFTEYYNAAKDRFSYFPDILCVLEKVNGKDRYQPKSEKDAFNVLSSVNMLRNSLFHFAPKSNDGKARIAVFKNQFDSDFSHITSTVNKIYSAKIAGVNENFLNNEGNNLYIILKATNWDIKKIVPQLYRFSVLKSDKNMGFNMRKLREFAVESKNIDLSRLNDKFLTNNRKKLYKVIDFIIYYHLNKVLKDSFVDDFVAALRASQSEEEKEKLYAQYSERLFA

SEQ ID NO: 6 - protein, 295 aa, Artificial Sequence
  Gut_metagenome_contig855000317
TDNPLHGAGGIARDHSDLIHARKALEMRYYGQTFEDNIHIQLIYNILDIEKILSVHINNIVYTLNNLLRPLTDNNFDFIGELSTYRDYEKFLEVSEIEYIIDENGEEKQNKEYTKRKLFFRLCYMPQLRYFNIIVEGPHEPVVQVENPELLKKIEASRISDRAKTVTFNEKEFYNVLIALGTLRQMEAHGNPLINIYQFDKKQNVYSTLTKKYKERVITLDNGFLSRAKKNLIILFRAYGIEDAEEKKQYIRNYYDFTVRKNYKNQGFSIKTLREHITTDIEEAIQLRSTAFDSV

SEQ ID NO: 7 - protein, 159 aa, Artificial Sequence
  Gut_metagenome_contig3389000027
PEKAAFTVHNDCEAFFEIDGRVQRAVADNPLHKYEKDDHGQDRISREKLEMRYYGRTFEDNIHIQVIYNILDIEKIMSIHINNIIFTINNLLRREEEDFSDLIGYITLCEKYEDLSKKGREEIRDSFDRLCKAPQLAYYNFQIEKKGKKDPNAIILTEK

SEQ ID NO: 8 - protein, 108 aa, Artificial Sequence
  Gut_metagenome_contig8061000170
EVTGRGQGATADNPLYKYSQKKAWDRQDRISKDKLELRYYGQTFEDNIHIQTIYNILDIEKILSIHINNIVFTINNLLRNDNDEQDDIVGYISLCKKYADLSKEKNAE

SEQ ID NO: 9 - protein, 237 aa, Artificial Sequence
  Gut_metagenome_contig1509000299
MKSTFVLGENNLLMTSFGKGNKAVVEKQIRDQQITDLSDPSAFTVKQDKDLHFNIDGRVRGASTDNPFHHNPEKTAQPPVRDDLIHARSFLEKRYYGENFTDNIHIQCIYSILDVEKILVSHINNIVYMLNNFLREEGETLTDLIGYLSIFKSYEGLMNSTRNDAAEMRRHFFSLCQAKQLGYLNLEVLKPQPDKPKQGKKKPADPNTIKLTEEEFFNVLLALSNMRQMLVHGNAKQ

SEQ ID NO: 10 - protein, 214 aa, Artificial Sequence
  Gut_metagenome_contig9549000591
KAKLEKRYFGQTFEDNIHIQVIYNMLDIEKILTIHVNNIVFTINNFLREEGEDLTDIVGYITKYKSLAKFKENKNAREYYELFCKLCDAKQLGYLNLEYNSVRSKLYKLFDFILVHHYKNDSSPESTALKNLLRTCLTDEEKEKVYVQTAKELTALYSYHFKEASVSVNARNIKEYQEKAQVYHISIADKISSTGIGLFSQLIYMLTLLLDGKE

SEQ ID NO: 11 - protein, 422 aa, Artificial Sequence
  Gut_metagenome_contig71000500
MKKQKSKKTVSKTSGLKEALSVQGTVIMTSFGKGNMANLSYKIPSSQKPQNLNSSAGLKNVEVSGKKIKFQGRHPKIATTDNPLFKPQPGMDLLCLKDKLEMHYFGKTFDDNIHIQLIYQILDIEKILAVHVNNIVFTLDNVLHPQKEELTEDFIGAGGWRINLDYQTLRGQTNKYDRFKNYIKRKELLYFGEAFYHENERRYEEDIFAILTLLSALRQFCFHSDLSSDESDHVNSFWLYQLEDQLSDEFKETLSILWEEVTERIDSEFLKTNTVNLHILCHVFPKESKETIVRAYYEFLIKKSFKNMGFSIKKLREIMLEQSDLKSFKEDKYNSVRAKLYKLFDFIITYYYDHHAFEKEALVSSLRSSLTEENKEEIYIKTARTLASALGADFKKAAADVNAKNIRDYQKKANDYRISFED

SEQ ID NO: 12 - protein, 49 aa, Artificial Sequence
  exemplary Cas13d sequence from human gut metagenome
IKIGNTGIGYFSELIYMLTLLLDGKEINDLLTTLINKFDNIISFIDILK

SEQ ID NO: 13 - protein, 148 aa, Artificial Sequence
  Gut_metagenome_contig3915000357
MKDKLEQWYFDKTFDDNIHIQLIYQIQDIEKILASHVNNIVFALDNILHATESETGDFLGMGYMRATNTFEEYRDSAISNVKKSYETFETYIKKKELLYFGEAFYHGNTCRKPEDIYHILAMVSSLRQFCFHSTFDDKSKSIKGSWLY

SEQ ID NO: 14 - protein, 137 aa, Artificial Sequence
  Gut_metagenome_contig4719000173
KNVITSRSFYYLVRYAKPTAVRKLMSNPKIVRYVLKRLPENQVASYYSAIWTQSESNSNETVKLIEMIDRLTTEIAGFSFAVLKDKKDSIVSASRESRAVNLEVERLKKLTTLYMSIAYIAVKSLVKVNARYFIAYS

SEQ ID NO: 15 - protein, 95 aa, Artificial Sequence
  Gut_metagenome_contig6929000468
MKTIKKSSKAYGLKSTFAYNDDVYMTSFGKGNDFVMEKLIYPNDNVEDLSDNPKFDVEVENKDITLKYKKSEINVNNPAKSGIKQDYLMLKDKLE

SEQ ID NO: 16 - protein, 114 aa, Artificial Sequence
  Gut_metagenome_contig7367000486
NRLKTKADLERLFSNRRIGYFGQAFYESDKQQRNEMEIYDNLALIGSLRQWAVHGNKTNDPAWLYKLESLPDEFKSVLDKVYAETVRKVNYKFIKTNAVNLQILQELYPKESFA

SEQ ID NO: 17 - protein, 107 aa, Artificial Sequence
  Gut_metagenome_contig7930000403
YAKIIIGEITSKYNKFDDIINLVYREIRNRNNTINFKNEIKNISTITNYSYFTKFIYFITKFLDGKEINELLTSLINKFDNIQAFNDILLEKLQDKNESKFAIFNGK

SEQ ID NO: 18 - protein, 282 aa, Artificial Sequence
  Gut_metagenome_contig993000527
NIDSLTAVYKGVNNQNRVEFGDKYDMFNKAGEICESLRSINSFARMESPAPAAKRTMFVDAIRMFGFADVSDNDAEKFYKENIEPFIYDRNGDIEDEWKKGKLVHKKDEKKKGVYNFIATNVIESNRFQYLVRYANTEKIAALARNETIVRFVIKKLPAAQIVRYYIACNRIRENINSNVLTSDDMAESLVKLVTGMDFGKIKGVRNDDRSGDKEMKKAIVTLYLTILYHLTKNLVYVNSRYFMAFHCLERDMNLFGEGQKQALRNTGDYPADNADLRRSDI

SEQ ID NO: 19 - protein, 118 aa, Artificial Sequence
  Gut_metagenome_contig6552000639
AVDLNPDDPAFNVNEVTEERFILDHGRIKGCIATADNPLHASSAPQDMLLLKSVLEERFFGMSFPEDNVHIQLIYNILDIEKILTVYSTNAVYAINNLFRADDQEDDEFIGDLSVDTS

SEQ ID NO: 20 - protein, 87 aa, Artificial Sequence
  Gut_metagenome_contig11932000246
RIVNSFAHMKKESMSAKKIMFDEALIVLGIDDAEKERELDQMLDKDARKQNPQRAGLRNFIANNVIESDRFKYLVRYGNVKRIKGIA

SEQ ID NO: 21 - protein, 85 aa, Artificial Sequence
  Gut_metagenome_contig12963000286
EKETELNLMLDKDARKQNRQKAGLRNFIANNVIESERFKYLVRYGNVKRIKGLSTNSQVMGFVLKDIADAQIVRYYRSIYGDDNC

SEQ ID NO: 22 - protein, 155 aa, Artificial Sequence
  Gut_metagenome_contig2952000470
IRLPNGTIMDECDVSKATTVKNRYLHNKKWYSLAFTNYKNSDSDVIVNFRNSVAHLNAIRNIDEYIDGIGEINSHTGYFEIYHYIIQKRMQAVTTDKSKLQPKTEEYFENLSKYHTYCKDFVKAYCVPMAYNLPRYKNLTIDGQFDRNIHTETKE

SEQ ID NO: 23 - protein, 406 aa, Artificial Sequence
  Gut_metagenome_contig451000394
LQELYPKESFASIVKEYYGFLVTKKYKNIGFSIKHLREILLDSTDYRDKEYDSVRHKLYQLLDFCIYHGYLYEDAEFAADLVNQLRASLSELDKEKIYNIEAARLADKLGSSLFSYLRRSVVGKNIQQLKKNAENLEKVKLEDIQISSGKTVSYFTKLMYLLTLFLDGKEINDLLTTLINKFDNIRVFNKTLTQLNQSTEFVEDYSFFGSSGTVFEELTVLNSFARMSRIDPSARKDMYRDAIEILGISMEMSHEKFEEMLDRILCYDEEGNPIINPDGTKKSGMRNFIATNIISSNRFKYLVRYGNATKIRALANCENAVKFVLSTIPDEQIVRYFDSCREPTDHIENNIERKREYLASIIKEMSFERFRDAEKLQRYHVDRPTNGSSVEGEQKQRYQAVIRLYL

SEQ ID NO: 24 - protein, 954 aa, Artificial Sequence; identical to SEQ ID NO: 1
  Eubacterium_siraeum_DSM_15702

SEQ ID NO: 25 - protein, 173 aa, Artificial Sequence
  gut_metagenome_P19E0k2120140920,_c369000003
DGKEINDLVTTLINKTENIASFNEVLKQLGYELDYSEEYSVFAASDEMASQLRALNSFARMEKPDASAKRIMFVEAARMLGDDSSYEELKAYFDDILAKKSKKEFDAATDNEAIRATDKKKKGFRNFIINNVIESDRFKYLIRYCNVESVQAFSKNRKLVKFVLKDIPESQIL

SEQ ID NO: 26 - protein, 111 aa, Artificial Sequence
  Gut_metagenome_contig7593000362
RMSEEAPSAKKVMYVEAAKVLGYSEPEEDLETYIEGILDKKKNVDASGKKNMNFRNFIANNVIESRRFKYLVRYCNPEKIRAMAENRKVVSFVLKGIPDAQIRAYYNSCNG

SEQ ID NO: 27 - protein, 86 aa, Artificial Sequence
  Gut_metagenome_contig12619000055
KLNAGFADKAKTDMQVLLDVLKIKGQEKEIEIAQNYYEFIVKKGYKNEGFSIKKLRQKLTSLSESEKEPLNSMRYDSVRPKLNHLL

SEQ ID NO: 28 - protein, 236 aa, Artificial Sequence
  Gut_metagenome_contig1405000151
KELFQKLCKAPQLAYFNLQIETEGKRKADPNAIKLTQEDFFSILYTLGYMRQMLMHGAPNQNIYKMDPLKDKTFKNCLDCLNRLYNERVMALNNNFLDLAKKNLSILFDVFAVKTQEEKAEYVRDYYDFVVRKQFKNQGFSIKCLREHMTDDIEEAGTLRDQKYDSVRGKLYPFINFAIFRYYNSHSSEAEALVERLRASMNEEEKDKVYRHEAVILWSKIRNLVLKHILPEMEGS

SEQ ID NO: 29 - protein, 103 aa, Artificial Sequence
  Chicken_gut_metagenome_c298474
SDHDKKALVQEYYEFVVLKNYKNLGFSIRRLRDTIIARETGADILSDTEYDTVRSKLYRAMDFKIYLYYQEHPEKAKTLIECLRASTEEAEKEWIYRREASAV

SEQ ID NO: 30 - protein, 225 aa, Artificial Sequence
  Gut_metagenome_contig1516000227
NKFDGESCKSFPLLMYLLCKFLDAKEVNELLTSIINKLENIESLIDALVTLNKWDGFSSNYSLFDKQNIRSLINDFRLVKNLSSSKRKLKKAKQYEYQKNKQLYADAINLFKKDNFVHLNDEEGTGLDLYLSTLLTKKSGNRGDKVKNFIESAIIKNRRFVYLIRYADPEKCYKLVHNEKMLRFVLGEYNEEMMPLSQLQKYYNAVTENNDSNCENRNKMIDTLV

SEQ ID NO: 31 - protein, 210 aa, Artificial Sequence
  Gut_metagenome_contig1838000319
LEYQITPENDVVKLPVSNSSSITVNSANDNIFEVTTSRSDLKDLEAKPSNPTKKSKSSEKSPRQDMLGLKSALEKEYFGKEFNDNIHIQIIHCIQDIEKILAVYSTNANYALVNLLGHNFKDESGKREDFLGSDAFKIEMSYESFSAPANETKLSSEKERTRENEEKRLKYLEDFNNMTDPDNYDKRLGYFGEAFFKPSKNRGKDTVADT

SEQ ID NO: 32 - protein, 84 aa, Artificial Sequence
  Gut_metagenome_contig13123000268
SPKDAGLAYRPAGVRPDQIGAKAALEKRYFGKETPGDNIHVQIAYQIQDIEKLLAVYISNIIYAVNNVTGVSAMKDSKGRPVDL

SEQ ID NO: 33 - protein, 115 aa, Artificial Sequence
  Gut_metagenome_contig5294000434
DKVVHVNVAQGIRDFIEDFKSNSDFSMNSYFELYNYLMQRMLVNEYTKKANDFKVEVPELLITYKNNLDKYKTYDRNFLHIINMPFAYNLARYKNLTIEDIFYDNYKDKLKTKRG

SEQ ID NO: 34 - protein, 377 aa, Artificial Sequence
  Gut_metagenome_contig6415000192
VNSDASDFCKLIYVFTRFLDGKEINILLNSLIKKFQDIHSFNTTVKKLSENNLIINADYVDDYSLFEQSGTVARELMLIKSISKMDFGLDNINLSFMYDDALRTLGVSDENLPEVKREYFGKTKNLSAYIRNNVLENRRFKYVIKYIHPSDVQKIACNKAIAGFVLNRMPDTQIKRYYDSLINKGATDIQAQAKALLDCITGISFDAIKDDKHLHKSKEKSPQRSADRERKKAMLTLYYTIVYIFVKQMLHINSLYTIGFFYLERDQRFIYSRAKKENKNPSKNSYLNDFRSVTAYFIPSEIMKRIEKNENKGFLEDFEALWNSCGKTSRLRKEDVLLYARYISPDHALKNYKMILNSYRNKIAHINVIMSAGKYTG

SEQ ID NO: 35 - protein, 123 aa, Artificial Sequence
  Gut_metagenome_contig6144000300
NKDILKLVIQELPETQILRYYSTIGKNKTTSIDEMKQCLIDAIYNFNIDDTLNAIGDSRVINEKKEQSKAIINLYLTVIYLVTKNMVKINTRFSIAFACLERDYYLHFGQPNGKLLYLQLTEE

SEQ ID NO: 36 - protein, 101 aa, Artificial Sequence
  Gut_metagenome_contig9118000041
DTDCDTQYELFNGDNPGKLANELRICKSLSRMKPEMDEIKKPLYKDALNILNIGNEEFDENTFEFLNREKGDHKLRNFIVNNVIESTRFMYVVKYMNPSNC

SEQ ID NO: 37 - protein, 331 aa, Artificial Sequence
  Activated_sludge_metagenome_transcript_124486
MVKTKAEIHQILRFLGTIRQCLAHKKDAKWDIIFNPDSMSNEFKTLIDSYYNGRVKALNDDFIKHNRSSSLPILFHYYGATEENRRAELTEGFYDFIIKRENKNMGFSLKKIREKMLEKQEASFIKEDGYNSVRHKLYILMDFIIYKTYAADIELQESIVATLRSNLTDEDKEATYEIQAKALWNKIGDDIVKKLMPLIDGNKIKGYKDEKIEIKKEWLKDVMISTENASYMTKMVYFMTLFLDGKEINEFLTVLINKFENIQGFFDVLGHNALAEKIEEPKEISKRPLKGFAELAAFTQKSTDVGLTEHLRLFENSVNISDEIRVTKNFA

SEQ ID NO: 38 - protein, 245 aa, Artificial Sequence
  Gut_metagenome_contig1322000437
INELLTTLINKFDDIQSLMDIATSKQVNVPCKFTSDYSIFNNSSRIVKELNVVKNVARMQKPTASVKTDMLMDALTLLGTDDTMDSEKLRNYVRVQIMKLDAEGKTSKSDDHTLRNFLINNVINSSRFIYVIKYVKADTAYALGHNRKAVAYVLHRIPEQQIDRYYSSCIDRDAGNRMEKENALVDMIVKLSFRDIENVSNDNEKASEKQRYRAVVGLYLTVIYELVKNIVNINSRYVIAFHSLE

SEQ ID NO: 39 - protein, 139 aa, Artificial Sequence
  Gut_metagenome_contig4582000531
SNDHALRNFIVNNVISSSRFTYIIKFINANIAYKIGHNRKAVSYVIKKLPPDQIDRYFTSCIGQESKQAEISDKRQALIDMITTLDYYRFTDINNEDIQKKEQYKAIIGLYLTVVYRLVKNIVNINSRYVIAFHCLERD

SEQ ID NO: 40 - protein, 100 aa, Artificial Sequence
  Gut_metagenome_contig9190000283
FVLNSIPDLQLDRYYKAITGKSDGNRVEKTDIIMDKLMKLDFNQLKVNEDQMGKKNIYFVEKLKALVGLYLTIIYLLTKSLVKINSIYILAFSCFERDYR

SEQ ID NO: 41 - protein, 213 aa, Artificial Sequence
  Gut_metagenome_contig1709000510
PKFKSGSHAQKYYGFIIFKSHKNLGFSIKELRKKLFDIEDAKAFSKKQYDSVRFKMNKLIDFFITYHYTTIDKKQADKLVSKLRYSIDEKEKDDIYTTEAEDLWNKYKSSFEQIRAYVSPDIITEYEHQATNFEYEIKKFDPSTELKTFFSKMIYVLCMFLDGKEINELLSTLINKFDNIDSFITTSEGITDECRFTGTGEKKNIYDIFNASG

SEQ ID NO: 42 - protein, 946 aa, Artificial Sequence
  M24_(LSQX01212483_Anaerobic_digester_metagenome)
MNNKRKTKAKAAGLKSVFFDQKQAVLTTFAKGNNSQIEKKVVNSEVKDLRQPPAFDLELKEKTFYISGKNNINTSRENPLASASLPLSKRQRIRAERIKRAREENRPYHNVKRVGEDDLRAKADLEKHYFGKEYSDNLKIQIIYNILDINKIISPYINDIVYSMNNLARNDEYIDGKIDVIGSLSSTTDYSSFMSPNKDLEKEKKFSFHRENYKKFVEASKPYMRYYGKVFIRDVKKSKLSTGKGEKIEVMYRSDEEIFTIFQILSYVRQSIMHNDIGNKSSILAIEKYPARFVGFLSDLLKTKTNDVNRMFIDNNSQTNFWVLFSIFGLQDHTSGADKICRNFYDFVIKADSKNLGFSLKKIRELMLDLPNANMLRDHQFDTVRSKFYTLLDFIIYQHYLEEKSRIDNMVEKLRMTLKEEEKEVLYAAEAKIVWNAIGAKVINKLVPMMNGDALKEIKRKNRDRKLPQSVIATVQVNSDANVFSGLIYFLTLFLDGKEINEMVSNLITKFENIDSLLHVDREIYKSDEKDLDLEIEKLALFFKGVVRPNAKTDTGAGEISKSFSIFQSAERIIEELKFIKNVTRMDNEIFPSEGVFLDAANVLGVRGDDFDFSNEFVGDDLHSDANKKIINKINGTKEDRNLRNFIINNVVKSRRFQYIARHMNTHYVKQLANNETLNRFVLNKMGDAKIINRYYESISGNTPNIEVRSQIDYLVKRLRSFSFEDLNDVKQKVRPGTNESIEKEKKKALVGLCLTIQYLVYKNLVNINARYTTAFYCLERDSKLKGFGVDVWRDFESYTALTNHFIKEGYLPVRKAEILRANLKHLDCEDGFKYYRNQVTHLNAIRVAYKYINEIKSVHSYFALYHYIMQRHLYDSLQAKAKDSSGFVIDALKKSFEHKIYSKDLLHVLHSPFGYNTARYKNLSIEALFDKNESRPEVNPLSTND

SEQ ID NO: 43 - protein, 150 aa, Artificial Sequence
  Gut_metagenome_contig3833000494
EEASDFKDKKNDSDRRKLYKLMDFCIFYLYYSDSKRNEDLVSRLRESLTDENKDIIYSKEAKTVWNELRKKFSTILDNVKGANIKKLEDVKEKFISEDEFDDIKLDIDISYFSKLMYVMCYFLDGKKINDLLTTLVSKFDNIGSIIEAAK

SEQ ID NO: 44 - protein, 123 aa, Artificial Sequence
  Activated_sludge_metagenome_transcript_117355
MEKMEKIRKSENRKSRAKAAGLKSTFVVADKLALTSFGKGNKANLEKIIKNEEVEEINKPPKFDAKVEEKQIHIIGKTIKDGITEKPAGMRNDLIGAKQELEKMFFGKTFDDNIHIQLIYNIL

SEQ ID NO: 45 - protein, 84 aa, Artificial Sequence
  Gut_metagenome_contig11061000330
SQRDSTINPGEKQISVEKLNPKMVQYAKAVINHGTYCKDAVKALCVPFAYQLVRYKNLTIDGLFDKNHPGDKKEAKTLALDDDV

SEQ ID NO: 46 - protein, 418 aa, Artificial Sequence
  Gut_metagenome_contig338000322
FDNIISFIDILKKLNLEFKFKPEYADFFNMTNCRYTLEELRVINSIARMQKPSADARKIMYRDALRILGMDNRPDEEIDRELERTMPVGADGKFIKGKQGFRNFIASNVIESSRFHYLVRYNNPHKTRTLVKNPNVVKFVLEGIPETQIKRYFDVCKGQEIPPTSDKSAQIDVLARIISSVDYKIFEDVPQSAKINKDDPSRNFSDALKKQRYQAIVSLYLTVMYLITKNLVYVNSRYVIAFHCLERDAFLHGVTLPKMNKKIVYSQLTTHLLTDKNYTTYGHLKNQKGHRKWYVLVKNNLQNSDITAVSSFRNIVAHISVVRNSNEYISGIGELHSYFELYHYLVQSMIAKNNWYDTSHQPKTAEYLNNLKKHHTYCKDFVKAYCIPFGYVVPRYKNLTINELFDRNNPNPEPKEEV

SEQ ID NO: 47 - protein, 418 aa, Artificial Sequence; identical to SEQ ID NO: 46
  exemplary Cas13d sequence from human gut metagenome

SEQ ID NO: 48 - protein, 109 aa, Artificial Sequence
  Gut_metagenome_contig9530000097
KSKHYRQCVKEDLLNARKLHTDDYNIDAIRAFRNAVAHLDVVRNMSAYIEGIREINSYYGLYHYLAQRCLQKRCNGALDDNTDYFRTLDKYNTYVKDFVKALCVPFAYN

SEQ ID NO: 49 - protein, 213 aa, Artificial Sequence
  Gut_metagenome_contig1750000258
STPDKARESLRDMLHNISFNDFADVKQDDRRATPEEKVEKERYKAIIGLYLTVMYHLVKNLVYVNSRYVMAFHCLERDAMHYDVCLDNYRDLIRHLISDGDSSCNHFISHNKRMRGCIEEDVNNSEQLIFGKEDAVIRFRNNVAHLSAIRNANEYIDDIREITSYFALYHYLMQRKLIDDCKVNDTAHKYFEKLTKYKTYVMDMVKALCSPFG

SEQ ID NO: 50 - protein, 131 aa, Artificial Sequence
  Gut_metagenome_contig5377000274
KENDILKKSRKKSSVKANGLKSVFVMENKALMTSFGKGNKANPEKELVGGEIRELTDSPVFDASNLGNIIEISRRGVRIEKKGYIASDYEIHKDVINAKDKLEERYFGSAMDDNIHIQMVYQILDIEKILS

SEQ ID NO: 51 - protein, 255 aa, Artificial Sequence
  gut_metagenome_P19E0k2120140920_c248000089
YSADMIDELAGIIHDMKFKQFENVDQSAKRGTPEAADKQQKQNVIRLYLTVCYLFFKNLIYVNSRYFLAFYCLERDVKLWGKTPKFGSREEDTSYTVLTREFMDSGKISTKSKSKNGAESPDEAAKHIPRNYIQKNLDNSDDVAIRYFRNAAEHINALQCAANYLENVEDTESYYRIYHYIMQRYIMQSYSQDKSGGKYDKADARDINDKTKEYFELVENHNTYCKDFVKALCVPFAYNLARFKNLSIDGLFDKN

SEQ ID NO: 52 - protein, 89 aa, Artificial Sequence
  Gut_metagenome_contig11400000031
NIVKHVLKDIPDTQIERYYKSYFNTENAANAEIMREKLASALMQVKYDEFKNVKQKVKNGTEEAFEKERKKALVRLYLTVVYIFVKNLV

SEQ ID NO: 53 - protein, 109 aa, Artificial Sequence
  Gut_metagenome_contig7940000191
NHIDHLNAVRNADKYLNDVRQVTSWYELFHYIVQRALFDDYLKALSYNPDAGKELNPRTLEYFAKVQKYGTCCKDFIKALNVPFAYNLPRYKNLSIDGLFDMNRPGEKG

SEQ ID NO: 54 - protein, 124 aa, Artificial Sequence
  Gut_metagenome_contig6049000251
LYLTSFGKGNAAVIEQKIEPENGYRVTGMQITPSITVNKATDESVRFRVKRKIAQKDEFIADNPMHEGRHRIEPSAGSDMLGLKTKLEKYYFGKEFDDNLHIQIIYNILDIEKILAVYSTNITA

SEQ ID NO: 55 - protein, 233 aa, Artificial Sequence
  Gut_metagenome_contig1137000500
MKKKKNLREQREAKKQERLAACSAKTKAAEIPAAEKPVATTPIAEPVKTDSKKKSSVKAAGLKSTLVLDNKLYTTSFGKGNEAVIEQEVNTADYTVANVNSTPSLEIRSAGDKELSFSSHRQFVNKDELSAVNPLYGGKDKPRKPAGKDMLGLKDKLEERYFGKSFNDNIHIQIIYNILDIEKILAVYATNITVALDHMIDKDVNIEKEDFIGYMNTLNTYEVFMDPSKNPKL

SEQ ID NO: 56 - protein, 69 aa, Artificial Sequence
  Gut_metagenome_contig9368000105
QRHVAEGVEPNRHDFAERFPYYAALYQYHSYVKDFVKALNAPFGYNIPRFKNLTIEELFDRNIHIETYV

SEQ ID NO: 57 - protein, 358 aa, Artificial Sequence
  Gut_metagenome_contig546000275
MDSYRPKLYKLIDFCIFKHYHEYTEISEKNVDTLRAAVSEEQKESFYADEAKRLWGIFDKQFLGFCKKINVWVNGSHEKEILGYIDKDAYRKKSDVSYFSKFLYAMSFFLDGKEINDLLTTLINKFDNIASFISTAKELDAEIDRILEKKLDPVTGKPLKGKNSFRNFIANNVIENKRFIYVIKFCNPKNVLKLVKNTKVTEFVLKRMPESQIDRYYSSCIDTEKNPSVDKKISDLAEMIKKIAFDDFRNVRQKTRTREESLEKERFKAVIGLYLTVVYLLIKNLVNVNSRYVMAFHCLERDAKLYGINIGKNYIELTEDLCRENENSRSAYLARNKRLRDCVKQNIDNAKNMKSKEK

SEQ ID NO: 58 - protein, 114 aa, Artificial Sequence
  Gut_metagenome_contig7216000573
KEMIYANEATFLWDKLGRTFLNFCDNIGAWVKNDHTEEIETYIDKDAYKTSSKVSYFSKLLYAMCFFLDGKEINDLLTTLINKFDNIGSFIETAKELGLSVTFIKDYAFFNASK

SEQ ID NO: 59 - protein, 136 aa, Artificial Sequence
  Gut_metagenome_contig4806000409
LIDSKRLRYFGFEYDPDGKNKNEEMKKRLYHLVAFAGQLRQWSFHSEGNFQLEWLYKLDDSRIAQEYRDTLDYFFDRRFDELNNNFVEQNATNLFILKETFPGEDLKAVTDLYYDFIIVKSQKNIGFSIKKLREKM

SEQ ID NO: 60 - protein, 94 aa, Artificial Sequence
  Gut_metagenome_contig10762000480
CFDTELNPMTEIKIQNLAQKMKDMDFTNFRDVQQKSRDPEKNREKERFKAIIGLYLTVVYRLVKNLADVNARYVMAFHSLERDSSLYNEPVVWK

SEQ ID NO: 61 - protein, 149 aa, Artificial Sequence
  Gut_metagenome_contig4114000374
DTKINPQTWLYQLENTPDLDNEYRDTLDHFFDERFNEINEHFVTQNATNLCIMKEVFPDEDFKSIADLYYDFIVVKSYKNIGFSIKKLREKMLELPEAKRVTSTEMDSVRSKLYKLIDFCIFKHYHEKPETVEMIVSMLRAYTSEDMKE

SEQ ID NO: 62 - protein, 933 aa, Artificial Sequence
  Ruminococcus_flavefaciens_FD1
MKKKMSLREKREAEKQAKKAAYSAASKNTDSKPAEKKAETPKPAEIISDNSRNKTAVKAAGLKSTIISGDKLYMTSFGKGNAAVIEQKIDINDYSFSAMKDTPSLEVDKAESKEISFSSHHPFVKNDKLTTYNPLYGGKDNPEKPVGRDMLGLKDKLEERYFGCTFNDNLHIQIIYNILDIEKILAVHSANITTALDHMVDEDDEKYLNSDYIGYMNTINTYDVFMDPSKNSSLSPKDRKNIDNSRAKFEKLLSTKRLGYFGFDYDANGKDKKKNEEIKKRLYHLTAFAGQLRQWSFHSAGNYPRTWLYKLDSLDKEYLDTLDHYFDKRFNDINDDFVTKNATNLYILKEVFPEANFKDIADLYYDFIVIKSHKNMGFSIKKLREKMLECDGADRIKEQDMDSVRSKLYKLIDFCIFKYYHEFPELSEKNVDILRAAVSDTKKDNLYSDEAARLWSIFKEKFLGFCDKIVVWVTGEHEKDITSVIDKDAYRNRSNVSYFSKLMYAMCFFLDGKEINDLLTTLINKFDNIANQIKTAKELGINTAFVKNYDFFNHSEKYVDELNIVKNIARMKKPSSNAKKAMYHDALTILGIPEDMDEKALDEELDLILEKKTDPVTGKPLKGKNPLRNFIANNVIENSRFIYLIKFCNPENVRKIVNNTKVTEFVLKRIPDAQIERYYKSCTDSEMNPPTEKKITELAGKLKDMNFGNFRNVRQSAKENMEKERFKAVIGLYLTVVYRVVKNLVDVNSRYIMAFHSLERDSQLYNVSVDNDYLALTDTLVKEGDNSRSRYLAGNKRLRDCVKQDIDNAKKWFVSDKYNSITKYRNNVAHLTAVRNCAEFIGDITKIDSYFALYHYLIQRQLAKGLDHERSGFDRNYPQYAPLFKWHTYVKDVVKALNAPFGYNIPRFKNLSIDALFDRNEIKKNDGEKKSDD

SEQ ID NO: 63 - protein, 70 aa, Artificial Sequence
  Gut_metagenome_contig7093000170
RQLAVGLDPKRSGFERNYPYFAKLFEWHTYVKDMVKALNAPFGYNIPRFKNLSIDDLFDMNEERVKDAKA

SEQ ID NO: 64 - protein, 91 aa, Artificial Sequence
  Gut_metagenome_contig11113000384
ASENERKAKQQAGQPAAKGNGEEKQKPILKLNPVRERKLSTTLKSRAKAAGLKSTFVINDKELLMTAFGRGNDAIPEKRILGAQVETLSEK

SEQ ID NO: 65 - protein, 119 aa, Artificial Sequence
  Gut_metagenome_contig6403000259
NKVKEFELDASVKYRLSKVVESVRLKDKATYFTKLIYLTTLFLDGKEINDLLTTLIHQFENIASFIDVMKDRGIADGFSGEYKFFESSKQVAFELRNVNSFARMTKASKDDDNAKQIMF

SEQ ID NO: 66 - protein, 123 aa, Artificial Sequence
  Gut_metagenome_contig6193000124
AEDYYDFLFKKTYKYLGFSIKTLREEFLTIKDAEKLKDKKYDSVRSKLYKVIDFLIFDLYQNRECLRINELVQRLRLSTDELTKAKIYADEAHFVYKKLWDIIDTEIVPQLDQKGIKALEEAY

SEQ ID NO: 67 - protein, 320 aa, Artificial Sequence
  Gut_metagenome_contig721000619
KEGSTMAKNEKKKSTAKALGLKSSFVVNNDIYMTSFGKGNKAVLEKKITENTIENKSDTTYFDVINRDPKGFTLEGRRIADMTAFSNDPKYHVNVVNGKFLEDQLGARSELEKKVFGRTFDDNVHIQLIHNILDIEKIMAQYVSDIVYLLHNTIKRDMNDDIMGYISIRNSFDDFCHPERIPDRKAKDNLQKQHDIFFDEILKCGRLAYFGNAFFEDGSDNKEIAKLKRYKEIYHIIALMGSLRQSYFHGENSDKNFQGPTWAYTLESNLTGKYKEFKDTLDKTFDERYEMISKDFGSTNMVNLQILEELLKMLYGNVSP

SEQ ID NO: 68 - protein, 220 aa, Artificial Sequence
  Gut_metagenome_contig1666000270
KELKFRINGKFIKNYHDRYDEDSANRRWKVVTKQNDVNLFCKLIYMMTLLLDGKEINDLLTTLVNKFDNIASFIDVMEDMGIEHRFIGGYDMFADSKKICVDLQMINSFARMQVTMKSAKKMLYRDALVILGMDQSEEEIERFMLENNIIKDNNEDKSEKKQHDFRNFLINSVINSSRFRYMVRYSSADGLRKLKKSRKLIGFVLNSLPETLIDRYYHSC

SEQ ID NO: 69 - protein, 204 aa, Artificial Sequence
  Gut_metagenome_contig2002000411
EKQNKAKYQAIISLYLMVMYQIVKNMIYVNSRYVIAFHCLERDSNQLLGRFNSRDASMYNKLTQKFITDKYLNDGAQGCSKKVGNYLSHNITCCSDELRKEYRNQVDHFAVVRMIGKYAADIGKFSTWFELYHYVMQRIIFDKRNPLSETERTYKQLIAKHHTYCKDLVKALNTPFGYNLARYKNLSIGELFDRNNYNAKTKET

SEQ ID NO: 70 - protein, 944 aa, Artificial Sequence
  Ruminococcus_albus
MAKKSKGMSLREKRELEKQKRIQKAAVNSVNDTPEKTEEANVVSVNVRTSAENKHSKKSAAKALGLKSGLVIGDELYLTSFGRGNEAKLEKKISGDTVEKLGIGAFEVAERDESTLTLESGRIKDKTARPKDPRHITVDTQGKFKEDMLGIRSVLEKKIFGKTFDDNIHVQLAYNILDVEKIMAQYVSDIVYMLHNTDKTERNDNLMGYMSIRNTYKTFCDTSNLPDDTKQKVENQKREFDKIIKSGRLGYFGEAFMVNSGNSTKLRPEKEIYHIFALMASLRQSYFHGYVKDTDYQGTTWAYTLEDKLKGPSHEFRETIDKIFDEGFSKISKDFGKMNKVNLQILEQMIGELYGSIERQNLTCDYYDFIQLKKHKYLGFSIKRLRETMLETTPAECYKAECYNSERQKLYKLIDFLIYDLYYNRKPARIEEIVDKLRESVNDEEKESIYSVEAKYVYESLSKVLDKSLKNSVSGETIKDLQKRYDDETANRIWDISQHSISGNVNCFCKLIYIMTLMLDGKEINDLLTTLVNKFDNIASFIDVMDELGLEHSFTDNYKMFADSKAICLDLQFINSFARMSKIDDEKSKRQLFRDALVILDIGNKDETWINNYLDSDIFKLDKEGNKLKGARHDFRNFIANNVIKSSRFKYLVKYSSADGMIKLKTNEKLIGFVLDKLPETQIDRYYESCGLDNAVVDKKVRIEKLSGLIRDMKFDDFSGVKTSNKAGDNDKQDKAKYQAIISLYLMVLYQIVKNMIYVNSRYVIAFHCLERDFGMYGKDFGKYYQGCRKLTDHFIEEKYMKEGKLGCNKKVGRYLKNNISCCTDGLINTYRNQVDHFAVVRKIGNYAAYIKSIGSWFELYHYVIQRIVFDEYRFALNNTESNYKNSIIKHHTYCKDMVKALNTPFGYDLPRYKNLSIGDLFDRNNYLNKTKESIDANSSIDSQ

SEQ ID NO: 71 - protein, 449 aa, Artificial Sequence
  Gut_metagenome_contig13552000311
LIDFLIYDLYYNRKPARIEEIVDKLRESVNDEEKESIYSAETKYVYEALGKVLVRSLKKYLNGATIRDLKNRYDAKTANRIWDISEHSKSGHVNCFCKLIYMMTLMLDGKEINDLLTTLVNKFDNIASFIDVMDELGLEHSFTDNYKMFADSKAICLDLQFINSFARMSKIDDEKSKRQLFRDALVVLDIGDKNEDWIEKYLTSDIFKRDENGNKIDGEKRDFRNFIANNVIKSARFKYLVKYSSADGMIKLKKNEKLISFVLEQLPETQIDRYYESCGLDCAVADRKVRIEKLTGLIRDMRFDNFRGVNYSNDACKKDKQAKAKYQAIISLYLMVLYQIVKNMIYVNSRYVIAFHCLERDLLFFNIELDNSYQYSNCNELTEKFIKDKYMKEGALGFNMKAGRYLTKNIGNCSNELRKIYRNQVDHFAVVRKIGNYAADIASVGSWFE

SEQ ID NO: 72 - protein, 96 aa, Artificial Sequence
  Gut_metagenome_contig10037000527
YMDQNFANSDAWAIHVYRNKIQHLDAVRHADMYIGDIREFHSWFELYHYIIQRRIIDQYAYESTPGSSRDGSAIIDEERLNPATRRYFRLITTYKT

SEQ ID NO: 73 - protein, 519 aa, Artificial Sequence
  Gut_metagenome_contig238000329
RYDKDRSKIYTMMDFVIYRYYIDNNNDSIDFINKLRSSIDEKSKEKLYNEEANRLWNKLKEYMLYIKEFNGKLASRTPDRDGNISEFVESLPKIHRLLPRGQKISNFSKLMYLLTMFLDGKEINDLLTTLINKFENIQGFLDIMPEINVNAKFEPEYVFFNKSHEIAGELKLIKGFAQMGEPAATLKLEMTADAIKILGTEKEDAELIKLAESLFKDENGKLLGNKQHGMRNFIGNNVIKSKRFHYLIRYGDPAHLHKIATNKNVVRFVLGRIADMQKKQGQKGKNQIDRYYEVCVGNKDIKKTIEEKIDALTDIIVNMNYDQFEKKKAVIENQNRGKTFEEKNKYKRDNAEREKFKKIISLYLTVIYHILKNIVNVNSRYILGFHCLERDKQLYIEKYNKDKLDGFVALTKFCLGDEERYEDLKAKAQASIQALETANPKLYAKYMNYSDEEKKEEFKKQLNRERVKNARNAYLKNIKNYIMIRLQLRDQTDSSGYLCGEFRDKVAHLEVARHAHEYI

SEQ ID NO: 74 - protein, 181 aa, Artificial Sequence
  Gut_metagenome_contig2643000492
NGEIVSLAEKEAFSAKIADKNIGCKIENKQFRHPKGYDVIADNPIYKGSPRQDMLGLKETLEKRYFSPSDSIDNVRVQVAHNILDIEKILAEYITNAVYSFDNIAGFGKDIIGDDFSPVYTYDKFEKSDRYEYFKNLLNNSRLGYYGQAFFECDDSKENKKKKDAIKCYNIIALLSGLRHW

SEQ ID NO: 75 - protein, 440 aa, Artificial Sequence
  Gut_metagenome_contig874000057
MSKNKESYAKGMGLKSALVSGSKVYMTSFEGGNDAKLEKVVENSEIVSLAEKESFSAEIFKKNIGCKIENKKFKHPKRYDVIADNPLYKGSVRQDMLGLKETLEKRYFNSADGTDNVCIQVIHNILDIEKILAEYITNAVYSFDNIAGFGEDIIGMGGFKPIYTYKQFKEPDKYNKKFDDILNNSRLGYYGKAFFEKNDLKHNPNKKKRDKNPYILKYDNECYYIIALLSGLRHWNIHSHAKDDLVSYRWLYNLDSILNREYISTLNYLYDDIADELTESFSKNSSANVNYIAETLNIDPSEFAQQYFRFSIMKEQKNMGFNVSKLREIMLDRKELSDIRDNHRVFDSIRSKLYTMMDFVIYRYYIEEAAKTEAENRNLPENEKKISEKDFFVINLRGSFDENQKEKLYIEEAKRLWEKLKDIMLKIKEFRGEKVKEYKK

SEQ ID NO: 76 - protein, 137 aa, Artificial Sequence
  Gut_metagenome_contig4781000489
LDKQLDYEYIRTLNYMFNDIADELTRTFSKNSAANVNYIAETLNIDPNKFAEQYFRFSIMKEQKNLGFNLTKLRESMLDRRELSDIRDNHNVFDSIRPKLYTMMDFVIYKHYIDEAKKTEAENKSLPDDRKNLSEKD

SEQ ID NO: 77 - protein, 87 aa, Artificial Sequence
  Gut_metagenome_contig12144000352
RMGEPVANTKRVMMIDAVKILGTDLSDDELKEMADSFFKDSDGNLLKKGKHGMRNFITNNVIKNKRFHYLIRYGDPAHLHEIAKNEA

SEQ ID NO: 78 - protein, 414 aa, Artificial Sequence
  Gut_metagenome_contig5590000448
VHNNEEKDLIKYTWLYNLDKYLDAEYITTLNYMYNDIGDELTDSFSKNSAANINYIAETLGIDPKTFAEQYFRFSIMKEQKNLGFNLTKLREVMLDRKDMSEIRENHNDFDSIRAKVYTMMDFVIYRYYIEEAAKVNAANKSLPDNEKSLSEKDIFVISLRGSFNEDQKDRLYYDEAQRLWSKVGKLMLKIKKFRGKDTRKYKNMGTPRIRRLIPEGRDISTFSKLMYALTMFLDGKEINDLLTTLINKFDNIQSFLKVMPLIGVNAKFAEEYSFFNNSEKIADELRLIKSFARMGEPVADARRAMYIDAIRILGTDLSDDELKALADSFSLDENGNKLGKGKHGMRNFIINNVITNKRFHYLIRYGNPVHLHEIAKNEAVVKFVLGRIADIQKKQGQNGKNQIDRYYETCIGK

SEQ ID NO: 79 - protein, 109 aa, Artificial Sequence
  Gut_metagenome_contig9269000031
LSEKDIFVISLRGSFNEDQKDRLYYDEAQRLWSKLGKLMLKIKEFKGKDTKKYRDMGKPRLRRILPEGRDISTFSKLMYALTMFLDGKEINDLLTTLINKFDNIQSFLK

SEQ ID NO: 80 - protein, 105 aa, Artificial Sequence
  Gut_metagenome_contig8537000520
SARLADELRIVKSVSRMEMPMPAAKTLMFEDALKLFWIDSPEEAKKIISGDNKKIRNFIANNVVESSWFNYIVRYTDLKNARDFIRCRPIVEFVLNKVPETQIDR

SEQ ID NO: 81 - protein, 211 aa, Artificial Sequence
  Gut_metagenome_contig1845000130
SSLNEVEKDAIYAEEAKQAWVNIRDLVIRHILPMMKGDYIAQISVEDEKIDQSILEDVFISKITPSALAEFIYIVTLFIDGKEINDLLTQMIHKFDSIAAFQEVMRQRCMVTQFNQDYAIFEQSGKIAEDLRVVNSFARMSISKDGPNVKGAMFREALLILGLASPDETMESVLQKYMNSNLDRERKSVRNFVINNVIQSRRFHYLVRYGN

SEQ ID NO: 82 - protein, 906 aa, Artificial Sequence
  gut_metagenome_P13E0k2120140920_c3000072
MEREVKKPPKKSLAKAAGLKSTFVISPQEKELAMTAFGRGNDALLQKRIVDGVVRDVAGEKQQFQVQRQDESRFRLQNSRLADRTVTADDPLHRAETPRRQPLGAGMDQLRRKAILEQKYFGRTFDDNIHIQLIYNILDIHKMLAVPANHIVHTLNLLGGYGETDFVGMLPAGLPYDKLRVVKKKNGDTVDIKADIAAYAKRPQLAYLGAAFYDVTPGKSKRDAARGRVKREQDVYTILSLMSLLRQFCAHDSVRIWGQNTPAALYGLQALPQDMKDLLDDGWRRALGGVNDHFLDTNKVNLLTLFEYYGAETKQERVALTQDFYRFVVLKEQKNMGFSLRRLREELLKLPDAAYLTGQEYDSVRQKLYMLLDFLLCRLYAQERADRCEELVSALRCALSDEEKDAVYQAEAAALWQALGDTLRRELLPLLKGKKLQDKDKKKLDELGLSRDVLDGVLFRPAQQGSRANADYFCRLMHLSTWFMDGKEINTLLTTLISKLENIDSLRSVLESMGLAYSFVPAYAMFDHSRYIAGQLRVVNNIARMRKPAIGAKREMYRAAVVLLGVDSPEAAAAITDDLLQIDPETGKVRPRGDSARDTGLRNFVANNVVESRRFTYLLRYMTPEQARVLAQNEKLIAFVLSTVPSAQLERYCRTCGREDITGRPAQIRYLTAQIMGVRYESFTDVEQRGRGDNPKKERYKALIGLYLTVLYLAVKNMVNCNARYVIAFYCRDRDTALYQKEVCWYDLEEDKKSGKQRQVEDYTALTRYFVSQGYLNRHACGYLRSNMNGISNGLLAAYRNAVDHLNVIPPLGSLCRDIGRVDSYFALYHYAVQQYLNGRYYRKTPREQELFAAMAQHRTWCSDLVKALNTPFGYNLARYKNLSIDGLFDREGDHVVREDGEKPAE

SEQ ID NO: 83 - protein, 906 aa, Artificial Sequence
  gut_metagenome_P1E0k2120140920_c1000078
MEREVKKPPKKSLAKAAGLKSTFVISPQEKELAMTAFGRGNDALLQKRIVDGVVRDVAGEKQQFQVQRQDESRFRLQNSRLADRTVTADDPLHRAETPRRQPLGAGMDQLRRKAILEQKYFGRTFDDNIHIQLIYNILDIHKMLAVPANHIVHTLNLLGGYGETDFVGMLPAGLPYDKLRVVKKKNGDTVDIKADIAAYAKRPQLAYLGAAFYDVTPGKSKRDAARGRVKREQDVYAILSLMSLLRQFCAHDSVRIWGQNTTAALYHLQALPQDMKDLLDDGWRRALGGVNDHFLDTNKVNLLTLFEYYGAETKQARVALTQDFYRFVVLKEQKNMGFSLRRLREELLKLPDAAYLTGQEYDSVRQKLYMLLDFLLCRLYAQERADRCEELVSALRCALSDEEKDTVYQAEAAALWQALGDTLRRKLLPLLKGKKLQDKDKKKSDELGLSRDVLDGVLFRPAQQGSRANADYFCRLMHLSTWFMDGKEINTLLTTLISKLENIDSLRSVLESMGLAYSFVPAYAMFDHSRYIAGQLRVVNNIARMRKPAIGAKREMYRAAVVLLGVDSPEAAAAITDDLLQIDPETGKVRPRSDSARDTGLRNFIANNVVESRRFTYLLRYMTPEQARVLAQNEKLIAFVLSTVPDTQLERYCRTCGREDITGRPAQIRYLTAQIMGVRYESFTDVEQRGRGDNPKKERYKALIGLYLTVLYLAVKNMVNCNARYVIAFYCRDRDTALYQKEVCWYDLEEDKKSGKQRQVEDYTALTRYFVSQGYLNRHACGYLRSNMNGISNSLLTAYRNAVDHLNAIPPLGSLCRDIGRVDSYFALYHYAVQQYLNGRYYRKTPREQELFAAMAQHRTWCSDLVKALNTPFGYNLARYKNLSIDGLFDREGDHVVREDGEKPAE

SEQ ID NO: 84 - protein, 84 aa, Artificial Sequence
  Gut_metagenome_contig12990000099
INDLLTTLIHKFENIAAFLHVIQAEKLPVEFVPEFQVFSDSQKIAEELRIINSFARMNKPSANAREIMYIEAFKVLGMSGDEKQ

SEQ ID NO: 85 - protein, 345 aa, Artificial Sequence
  Gut_metagenome_contig525000349
MSKKENRKSYVKGLGLKSTLVSDSKVYLTTFADGSNAKLEKCVENNKIICISNDKEAFAASIANKNVGYKIKNDEKFRHPKGYDIISNNPLLHNNSVQQDMLGLKNVLEKRYFGKSSGGDNNLCIQIIHNIIDIEKILSEYIPNVVYAFNNIAGFKDEHNNIIDIIGTQTYNSSYTYADFSKDKSDKKYIEFQKLLKNKRLGYWGKAFFTGQGNNAKVRQENQCFHIIALLISLRNWATHSNELDKHTKRTWLYKLDDTNILNAEYVKTLNYLYDTIADELTKSFSKNGAVNVNYLAKKYNIKDDLPGFSEQYFRFSIMKEQKNLGFNISKLRENMLDFKDMSVI

SEQ ID NO: 86 - protein, 206 aa, Artificial Sequence
  Gut_metagenome_contig7229000302
KKISSLTKFCLGESDEKKLKALAKKSLEELKTTNSKLYENYIKYSDERKAEEAKRQINRERAKTAMNAHLRNTKWNDIMYGQLKDLADSKSRICSEFRNKAAHLEVARYAHMYINDISEVKSYFRLYHYIMQRRIIDVIENNPKAKYEGKVKVYFEDVKKNKKYNKNLLKLMCVPFGYCIPRFKNLSIEQMFDMNETDNSDKKKEK

SEQ ID NO: 87 - protein, 95 aa, Artificial Sequence
  Gut_metagenome_contig3227000343
IGDISEVNSYFQLYHYIMQRILIDKIGSKTTGKAKEYFDSVIVNKKYDDRLLKLLCSPLGYCLTRYKDLSIEALFDMNEAAKYDKLNKERKNKKK

SEQ ID NO: 88 - protein, 115 aa, Artificial Sequence
  Gut_metagenome_contig7030000469
SIRSKLYTMMDFVIYRYYIEESAKAAAENKPSESDSFVIRLRGSFNENQKEELYIEEAERLWKKFGEIMLKIKEFRGEKVKEYKKEVPRIERILPHGKDISAFSKLMYMLSMFLD

SEQ ID NO: 89 - protein, 110 aa, Artificial Sequence
  Gut_metagenome_contig5149000068
FRNKVAHLEAVRYAHLYINDIAEVNSYFQLYHYIIQRRIMAECYDKSSGKVREYFNAVNKEKKYNDRLLKLLCVPFGYCVTRFKDLSIEALFDKNEADRFDKEKKKAEKK

SEQ ID NO: 90 - protein, 84 aa, Artificial Sequence
  Gut_metagenome_contig400200045
MIEKKKSYAKGMGLKSTIVSGSKVYMTTFGDGSEARLEKVVENDSIKTLHEGEAFSAEMTDNNAGYKIGNVKFSHPNGYDVVAN

SEQ ID NO: 91 - protein, 94 aa, Artificial Sequence
  Gut_metagenome_contig10420000446
SSKSVAEKVNALTKIITGMNYDQFDSRRNVIENTGAGNAEREKYKKIISLYLTVIYHILKNIVNINSRYVIGFHCVERDAQLYKEKGYDINLKK

SEQ ID NO: 92 - protein, 967 aa, Artificial Sequence
  new_flavefaciens,_strain_XPD3002
MIEKKKSFAKGMGVKSTLVSGSKVYMTTFAEGSDARLEKIVEGDSIRSVNEGEAFSAEMADKNAGYKIGNAKFSHPKGYAVVANNPLYTGPVQQDMLGLKETLEKRYFGESADGNDNICIQVIHNILDIEKILAEYITNAAYAVNNISGLDKDIIGFGKFSTVYTYDEFKDPEHHRAAFNNNDKLINAIKAQYDEFDNFLDNPRLGYFGQAFFSKEGRNYIINYGNECYDILALLSGLRHWVVHNNEEESRISRTWLYNLDKNLDNEYISTLNYLYDRITNELTNSFSKNSAANVNYIAETLGINPAEFAEQYFRFSIMKEQKNLGFNITKLREVMLDRKDMSEIRKNHKVFDSIRTKVYTMMDFVIYRYYIEEDAKVAAANKSLPDNEKSLSEKDIFVINLRGSFNDDQKDALYYDEANRIWRKLENIMHNIKEFRGNKTREYKKKDAPRLPRILPAGRDVSAFSKLMYALTMFLDGKEINDLLTTLINKFDNIQSFLKVMPLIGVNAKFVEEYAFFKDSAKIADELRLIKSFARMGEPIADARRAMYIDAIRILGTNLSYDELKALADTFSLDENGNKLKKGKHGMRNFIINNVISNKRFHYLIRYGDPAHLHEIAKNEAVVKFVLGRIADIQKKQGQNGKNQIDRYYETCIGKDKGKSVSEKVDALTKIITGMNYDQFDKKRSVIEDTGRENAEREKFKKIISLYLTVIYHILKNIVNINARYVIGFHCVERDAQLYKEKGYDINLKKLEEKGFSSVTKLCAGIDETAPDKRKDVEKEMAERAKESIDSLESANPKLYANYIKYSDEKKAEEFTRQINREKAKTALNAYLRNTKWNVIIREDLLRIDNKTCTLFRNKAVHLEVARYVHAYINDIAEVNSYFQLYHYIMQRIIMNERYEKSSGKVSEYFDAVNDEKKYNDRLLKLLCVPFGYCIPRFKNLSIEALFDRNEAAKFDKEKKKVSGNS

SEQ ID NO: 93 - protein, 146 aa, Artificial Sequence
  M26_Gut_metagenome_contig698000307
MIEKKKSFAKGMGVKSTLVSGSKVYMTTFAEGSDAKLEKIVEGDSIRSVNEGEAFSAEMADKNAGYKIGNAKFSHPKGYAVVANNPLYTGPVQQDMLGLKETLEKRYFGESADGNDNICIQVIHNILDIEKILAEYITNAAYSVTD

SEQ ID NO: 94 - protein, 724 aa, Artificial Sequence
  M36_Uncultured_Eubacterium_sp_TS28_c40956
RIRFVLSGIFVNAFSSKHGFESGVEINTSNPTHRSGESSPVRGDMLGLKSELEKRFFGKTFDDNIHIQLIYNILDIEKILAVYVTNIVYALNNMLGVKGSESHDDFIGYLSTNNTYDVFIDPDNSSLSDDKKANVRKSLSKFNVLLKTKRLGYFGLEEPKTKDNRVSEAYKKRVYHMLAIVGQIRQCVFHDKSGAKRFDLYSFINNIDPEYRDTLDYLVEERLKSINKDFIQGNKVNISLLIDMMKGYEADDIIRLYYDFIVLKSQKNLGFSIKKLREKMLEEYGFRFKDKQYDSVRSKMYKLMDFLLFCNYYRNDIAAGEALVRKLRFSMTDDEKEGLYADEAAKLWGKFRNDFENIADHMNGDVIKELGKADMDFDEKILDSEKKNASDLLYFSKMIYMLTYFLDGKEINDLLTTLISKFDNIKEFLKIMKSSAVNVECELTAGYKLFNDSQRITNELFIVKNIASMRKPAASAKLTMFRDALTILGIDDKITDDRISEILKLKEKGKGIHGLRNFITNNVIESSRFVYLIKYANAQKIRKVAENEKVVMFVLGGIPDTQIERYYKSCVEFPDMNSSLEVKRSELARMIKNISFDDFKNVKQQAKGQRKRRLRRGQKAVIGLYLTVMYLLVKNLVNVNARYVIAIHCLERDFGLYKEIIPELASKNLKNDYRILSQTLCELCDKSPNLFLKKNERLRKCVEVDINNADSSMTRKYRNCIAHL

SEQ ID NO: 95 - protein, 219 aa, Artificial Sequence
  M12_gut_metagenome_P25C0k2120140920_c134000066
MAKKNKMKPRELREAQKKARQFKAAEINNNAAPAIAAMPAAEVIAPVAEKKKSSVKAAGMKSILVSENKMYITSFGKGNSAVLEYEVDNNDYNKTQLSSKDNSNIELCGVNEVNITFSSKHGFESGVEINTSNPTHRSGESSPVRWDMLGLKSELEKRFFGKTFDDNIHIQLIYNILDIEKILAVYVTNIVYALNNMLGVKGSESHDDFIGYLSTNNIY

SEQ ID NO: 96 - protein, 915 aa, Artificial Sequence
  exemplary Cas13d sequence from human gut metagenome
MAKKNKMKPRELREAQKKARQFKAAEINNNAAPAIAAMPAAEVIAPVAEKKKSSVKAAGMKSILVSENKMYITSFGKGNSAVLEYEVDNNDYNKTQLSSKDNSNIELCGVNEVNITFSSKHGFESGVEINTSNPTHRSGESSPVRWDMLGLKSELEKRFFGKTFDDNIHIQLIYNILDIEKILAVYVTNIVYALNNMLGVKGSESHDDFIGYLSTNNIYDVFIDPDNSSLSDDKKANVRKSLSKFNVLLKTKRLGYFGLEEPKTKDTRVSQAYKKRVYHMLAIVGQIRQCVFHDKSGAKRFDLYSFINNIDPEYRETLDYLVDERFDSINKGFIQGNKVNISLLIDMMKGYEADDIIRLYYDFIVLKSQKNLGFSIKKLREKMLEEYGYRFKDKQMYKLMDFLLFCNYYRNDVVAGEALVRKLRFSMTDDEKEGIYADEASKLWGKFRNDFENIADHMNGDVIKELGKADMDFDEKILDSEKKNASDLLYFSKMIYMLTYFLDGKEINDLLTTLISKFDNIKEFLKIMKSSAVDVECELTAGYKLFNDSQRITNELFIVKNIASMRKPASSAKLTMFRDALTILGIDDNITDDRISEILKLKEKGKGIHGLRNFITNNVIESSRFVYLIKYANAQKIREVAKNEKVVMFVLGGIPDTQIERYYKSCVEFPDMNSSLEVKRSELARMIKNISFDDFKNVKQQAKGRENVAKERAKAVIGLYLTVMYLLVKNLVNVNARYVIAIHCLERDFGLYKEIIPELASKNLKNDYRILSQTLCELCDNGDESPNLFLKKNKRLRKCVEVDINNADSNMTRKYRNCIAHLTVVRELKEYIGDIRTVDSYFSIYHYVMQRCITKREDDTKQEEKIKYEDDLLKNHGYTKDFVKALNSPFGYNIPRFKNLSIEQLFDRNEYLTEK

SEQ ID NO: 97 - protein, 922 aa, Artificial Sequence
  M10_gut_metagenome_P25C90k2120140920,_c28000041
MAKKNKMKPRELREAQKKARQFKAAEINNNAAPAIAAMPAAEVIAPVAEKKKSSVKAAGMKSILVSENKMYITSFGKGNSAVLEYEVDNNDYNKTQLSSKDNSNIELCGVNEVNITFSSKHGFESGVEINTSNPTHRSGESSPVRWDMLGLKSELEKRFFGKTFDDNIHIQLIYNILDIEKILAVYVTNIVYALNNMLGVKGSESHDDFIGYLSTNNIYDVFIDPDNSSLSDDKKANVRKSLSKFNVLLKTKRLGYFGLEEPKTKDTRVSQAYKKRVYHMLAIVGQIRQCVFHDKSGAKRFDLYSFINNIDPEYRETLDYLVDERFDSINKGFIQGNKVNISLLIDMMKGYEADDIIRLYYDFIVLKSQKNLGFSIKKLREKMLEEYGYRFKDKQYDSVRSKMYKLMDFLLFCNYYRNDVVAGEALVRKLRFSMTDDEKEGIYADEASKLWGKFRNDFENIADHMNGDVIKELGKADMDFDEKILDSEKKNASDLLYFSKMIYMLTYFLDGKEINDLLTTLISKFDNIKEFLKIMKSSAVDVECELTAGYKLFNDSQRITNELFIVKNIASMRKPASSAKLTMFRDALTILGIDDNITDDRISEILKLKEKGKGIHGLRNFITNNVIESSRFVYLIKYANAQKIREVAKNEKVVMFVLGGIPDTQIERYYKSCVEFPDMNSSLEVKRSELARMIKNISFDDFKNVKQQAKGRENVAKERAKAVIGLYLTVMYLLVKNLVNVNARYVIAIHCLERDFGLYKEIIPELASKNLKNDYRILSQTLCELCDNGDESPNLFLKKNKRLRKCVEVDINNADSNMTRKYRNCIAHLTVVRELKEYIGDIRTVDSYFSIYHYVMQRCITKREDDTKQEEKIKYEDDLLKNHGYTKDFVKALNSPFGYNIPRFKNLSIEQLFDRNEYLTEK

SEQ ID NO: 98 - protein, 922 aa, Artificial Sequence; identical to SEQ ID NO: 97
  M11_gut_metagenome_P25C7k2120140920_c4078000105

SEQ ID NO: 99 - protein, 636 aa, Artificial Sequence
  gut_metagenome_P25C0k2120140920_c32000045
IRQCVFHDKSGAKRFDLYSFINNIDPEYRETLDYLVDERFDSINKGFIQGNKVNISLLIDMMKGYEADDIIRLYYDFIVLKSQKNLGFSIKKLREKMLEEYGYRFKDKQYDSVRSKMYKLMDFLLFCNYYRNDVVAGEALVRKLRFSMTDDEKEGIYADEASKLWGKFRNDFENIADHMNGDVIKELGKADMDFDEKILDSEKKNASDLLYFSKMIYMLTYFLDGKEINDLLTTLISKFDNIKEFLKIMKSSAVDVECELTAGYKLFNDSQRITNELFIVKNIASMRKPASSAKLTMFRDALTILGIDDNITDDRISEILKLKEKGKGIHGLRNFITNNVIESSRFVYLIKYANAQKIREVAKNEKVVMFVLGGIPDTQIERYYKSCVEFPDMNSSLEVKRSELARMIKNISFDDFKNVKQQAKGRENVAKERAKAVIGLYLTVMYLLVKNLVNVNARYVIAIHCLERDFGLYKEIIPELASKNLKNDYRILSQTLCELCDNGDESPNLFLKKNKRLRKCVEVDINNADSNMTRKYRNCIAHLTVVRELKEYIGDIRTVDSYFSIYHYVMQRCITKREDDTKQEEKIKYEDDLLKNHGYTKDFVKALNSPFGYNIPRFKNLSIEQLFDRNEYLTEK

SEQ ID NO: 100 - protein, 929 aa, Artificial Sequence
  M13_gut_metagenome_P23C7k2120140920_c3000067
MAKKNKMKPRELREAQKKARQLKAAEINNNAAPAIAAMPAAQVIAPAAEKKKSSVKAAGMKSILVSENKMYITSFGKGNSAVLEYEVDKVDNNNYNKTQLSSKDNSNIELGDVNEVNITFSSKHGFESGVEINTSNPTHRSGESSPVRWDMLGLKSELEKRFFGKTFDDNIHIQLIYNILDIEKILAVYVTNIVYALNNMLGIKGSESYDDFMGYLSARNTYEVFTHPDKSNLSDKVKGNIKKSFSTFNDLLKTKRLGYFGLEEPKTKDTRVSEAYKKRVYHMLAIVGQIRQCVFHDLSEHSEYDLYSFIDNSKKVYRECRETLNYLVDERFDSINKGFIQGNKVNISLLIDMMKDDYEADDIIHLYYDFIVLKSQKNLGFSIKKLREKMLDEYGFRFKDKQYDSVRSKMYKLMDFLLFCNYYRNDVVAGEALVRKLRFSMTDDEKEGIYADEAEKLWGKFRNDFENIADHMNGDVIKELGKADMDFDEKILDSEKKNASDLLYFSKMIYMLTYFLDGKEINDLLTTLISKFDNIKEFLKIMKSSAVDVECELTAGYKLFNDSQRITNELFIVKNIASMRKPAASAKLTMFRDALTILGIDDKITDDRISEILKLKEKGKGIHGLRNFITNNVIESSRFVYLIKYANAQKIREVAKNEKVVMFVLGGIPDTQIERYYKSCVEFPDMNSSLKVKRSELARMIKNIRFDDFKNVKQQAKGRENVAKERAKAVIGLYLTVMYLLVKNLVNVNARYVIAIHCLERDFGLYKEIIPELASKNLKNDYRILSQTLCELCDDRDESPNLFLKKNRRLRKCVEVDINNADSSMTRKYRNCIAHLTVVRELKEYIGDIRTVDSYFSIYHYVMQRCITKREDDTKQEEKIKYEDDLLKNHGYTKDFVKALNSPFGYNIPRFKNLSIEQLFDRNEYLTEK

SEQ ID NO: 101 - protein, 923 aa, Artificial Sequence
  M5_gut_metagenome_P18E90k2120140920
MAKKNKMKPRELREAQKKARQLKAAEINNNAVPAIAAMPAAEVIAPAAEKKKSSVKAAGMKSILVSENKMYITSFGKGNSAVLEYEVDKVDDNDYNKTQLSSKDNSNIELGNVNEVNITFSSRRGFESGVEINTSNPTHRSGESSSVRGDMLGLKSELEKRFFGKTFDDNIHIQLIYNILDIEKILAVYVTNIVYALNNMLGVKGSESYDDFMGYLSAQNTYYIFTHPDKSNLSDKVKGNIKKSLSKFNDLLKTKRLGYFGLEEPKTKDKRVSEAYKKRVYHMLAIVGQIRQSVFHDKSNELDEYLYSFIDIIDSEYRDTLDYLVDERFDSINKGFIQGNKVNISLLIDMMKDDYEADDIIRLYYDFIVLKSQKNLGFSIKKLREKMLEEYGFRFKDKQYDSVRSKMYKIMDFLLFCNYYRNDVVAGEALVRKLRFSMTDDEKEGIYADEAAKLWGKFRNDFENIADHMNGDVIKELGKADMDFDEKILDSEKKNASDLLYFSKMIYMLTYFLDGKEINDLLTTLISKFDNIKEFLKIMKSSAVDVECELTAGYKLFNDSQRITNELFIVKNIASMRKPAASAKLTMFRDALTILGIDDNITDDRISEILKLKEKGKGIHGLRNFITNNVIESSRFVYLIKYANAQKIREVAKNEKVVMFVLGGIPDTQIERYYKSCVEFPDMNSSLEVKRSELARMIKNICFDDFKNVKQQAKGRENVAKERAKAVIGLYLTVMYLLVKNLVNVNARYVIAIHCLERDFGLYKEIVSELASKNLKNDYRILSQTLCELCDKSPNLFLKKNERLRKCVEVDINNADSSMTRKYRNCIAHLTVVRELKEYIGDIRAVDSYFSIYHYVMQRCITKRGNDTKQEDKIKYEDDLLKNHGYTKDFVKALNSPFGYNIPRFKNLSIEQLFDRNEYLTEK

SEQ ID NO: 102 - protein, 923 aa, Artificial Sequence; identical to SEQ ID NO: 101
  M21_gut_metagenome_P18E0k2120140920

SEQ ID NO: 103 - protein, 926 aa, Artificial Sequence
  M7_gut_metagenome_P38C7k2120140920_c4841000003
  SITE (551)..(551): Xaa can be any naturally occurring amino acid
MAKKNKMKPRELREAQKKARQLKAAEINNNAAPAIAAMPAAEAIAPAAEKKKSSVKAAGMKSIFVSENKMYITSFGKGNSAVLEYEVDKVDNNVYNQTQLSSEDSSNIELCGVTKVNITFSSKHGLESGVEISTSNPTHRSGESSPVRWDMLGLKSELEKRFFGKTFDDNIHIQLIYNILDIEKILAVYVTNIVYALNNMLGIKDSESYDDFMGYLSARNTYKVFTHPDKSNLSDKVKGNIKKSFSTFNDLLKTKRLGYFGLEEPKTKDTRVSEAYKKRVYHMLAIVGQIRQCVFHDLSEHSEYDLYSFIDNSKKVYRECRETLNYLVDERFDSINKGFIQGNKVNISLLIDMMKDDYEADDIIHLYYDFIVLKSQKNLGFSIKKLREKMLDEYGFRFKDKQYDSVRSKMYKLMDFLLFCNYYRNDVVAGEALVRKLRFSMTDDEKEGIYADEAEKLWGKFRNDFENIADHMNGDVIKELGKADMDFDEKIIDSEKKNASDLLYFSKMIYMLTYFLDGKEINDLLTTLISKFDNIKEFLKIMKSSAVDVEXELTAGYKLFNDSQRITNELFIVKNIASMRKPAASAKLTMFRDALTILGIDDNITDDRISEILKLKEKGKGIHGLRNFITNNVIESSRFVYLIKYANAQKIREVAKNEKVVMFVLGGIPDTQIERYYKSCVEFPDMNSSLGVKRSELARMIKNISFDDFKNVKQQAKGRENVAKERAKAVIGLYLTVMYLLVKNLVNVNARYVIAIHCLERDFGLYKEIIPELASKNLKNDYRILSQTLCELCDKSPNLFLKKNERLRKCVEVDINNADSSMTRKYRNCIAHLTVVRELKEYIGDICTVDSYFSIYHYVMQRCITKRENDTKQEEKIKYEDDLLKNHGYTKDFVKALNSPFGYNIPRFKNLSIEQLFDRNEYLTEK

SEQ ID NO: 104 - protein, 918 aa, Artificial Sequence
  Ruminococcus_bicirculans
MAKKNKMKPRELREAQKKARQLKAAEINNNAVPAIAAMPAAEAAAPAAEKKKSSVKAAGMKSILVSENKMYITSFGKGNSAVLEYEVDNNDYNKTQLSSKDNSNIELCDVGKVNITFSSRRGFESGVEINTSNPTHRSGESSSVRGDMLGLKSELEKRFFGKNFDDNIHIQLIYNILDIEKILAVYVTNIVYALNNMLGEGDESNYDFMGYLSTFNTYKVFTNPNGSTLSDDKKENIRKSLSKFNALLKTKRLGYFGLEEPKTKDTRASEAYKKRVYHMLAIVGQIRQCVFHDKSGAKRFDLYSFINNIDPEYRETLDYLVDERFDSINKGFIQGNKVNISLLIDMMKGYEADDIIRLYYDFIVLKSQKNLGFSIKKLREKMLDEYGFRFKDKQYDSVRSKMYKLMDFLLFCNYYRNDIAAGESLVRKLRFSMTDDEKEGIYADEAAKLWGKFRNDFENIADHMNGDVIKELGKADMDFDEKILDSEKKNASDLLYFSKMIYMLTYFLDGKEINDLLTTLISKFDNIKEFLKIMKSSAVDVECELTAGYKLFNDSQRITNELFIVKNIASMRKPAASAKLTMFRDALTILGIDDKITDDRISEILKLKEKGKGIHGLRNFITNNVIESSRFVYLIKYANAQKIREVAKNEKVVMFVLGGIPDTQIERYYKSCVEFPDMNSSLGVKRSELARMIKNISFDDFKNVKQQAKGRENVAKERAKAVIGLYLTVMYLLVKNLVNVNARYVIAIHCLERDFGLYKEIIPELASKNLKNDYRILSQTLCELCDKSPNLFLKKNERLRKCVEVDINNADSSMTRKYRNCIAHLTVVRELKEYIGDICTVDSYFSIYHYVMQRCITKRENDTKQEEKIKYEDDLLKNHGYTKDFVKALNSPFGYNIPRFKNLSIEQLFDRNEYLTEK

SEQ ID NO: 105 - protein, 920 aa, Artificial Sequence
  our_cloned_CAG_Ncas1
MAKKNKMKPRELREAQKKARQLKAAEINNNAAPAIAAMPAAEAAAPAAEKKKSSVKAAGMKSILVSENKMYITSFGKGNSAVLEYEVDNNDYNQTQLSSKGSSNIELHGVNEVNITFSSKHGFESGVEINTSNPTHRSGESSPVRWDMLGLKSELEKRFFGKTFDDNIHIQLIYNILDIEKILAVYVTNIVYALNNMLGVKGSESHDDFIGYLSTNNTYDVFIDPDNSSLSDDKKANVRKSLSKFNVLLKTKRLGYFGLEEPKTKDTRVSQAYKKRVYLAIVGQIRQCVFHDKSGAKRFDLYSFINNIDPEYRETLDYLVDERFDSINKGFIEGNKINISLLIDMMKGYEADDIIRLYYDFIVLKSQKNLGFSIKKLREKMLDEYGFRFKDKQYDPVRSKMYKLMDFLLFCNHYRNDVAAGEALVRKLRFSMTDDEKEGIYADEAAKLWGKFRNDFENIADHMNGDVIKELGKADMDFDEKILDSEKKNASDLLYFSKMIYMLTYFLDGKEINDLLTTLISKFDNIKEFLKIMKSSAVDVECELTAGYKLFNDSQRITNELFIVKNIASMRKPAASAKLTMFRDALTILGIDDNITDDRISEILKLKEKGKGIHGLRNFITNNVIESSRFVYLIKYANAQKIREVAKNEKVVMFVLGGIPDTHIERYYKSCVEFPDMNSSLEAKRSELARMIKNISFDDFKNVKQQAKGRENVAKERAKAVIGLYLTVMYLLVKNLVNVNARYVIAIHCLERDFGLYKEIIPELASKNLKNDYRILSQTLCELCDDRDESPNLFLKKNKRLRKCVEVDINNADSSMTRKYRNCIAHLTVVRELKEYIGDIRTVDSYFSIYHYVMQRCITKRENDTKQEEKIKYEDDLLKNHGYTKDFVKALNSPFGYNIPRFKNLSIEQLFDRNEYLTEK

SEQ ID NO: 106 - protein, 922 aa, Artificial Sequence
  consensus_1
  SITE (89)..(89): Xaa can be any naturally occurring amino acid
  SITE (386)..(386): Xaa can be any naturally occurring amino acid
  SITE (789)..(790): Xaa can be any naturally occurring amino acid
MAKKNKMKPRELREAQKKARQLKAAEINNNAAPAIAAMPAAEVIAPAAEKKKSSVKAAGMKSILVSENKMYITSFGKGNSAVLEYEVDXNNDYNKTQLSSKDNSNIELGDVNEVNITFSSKHGFESGVEINTSNPTHRSGESSPVRWDMLGLKSELEKRFFGKTFDDNIHIQLIYNILDIEKILAVYVTNIVYALNNMLGIKGSESYDDFMGYLSARNTYDVFTHPDKSNLSDKVKGNIKKSLSKFNDLLKTKRLGYFGLEEPKTKDTRVSEAYKKRVYHMLAIVGQIRQCVFHDKSGAKRFDLYSFIDNIDPEYRDTLDYLVDERFDSINKGFIQGNKVNISLLIDMMKGYEADDIIRLYYDFIVLKSQKNLGFSIKKLREKMLXEYGFRFKDKQYDSVRSKMYKLMDFLLFCNYYRNDVVAGEALVRKLRFSMTDDEKEGIYADEAAKLWGKFRNDFENIADHMNGDVIKELGKADMDFDEKILDSEKKNASDLLYFSKMIYMLTYFLDGKEINDLLTTLISKFDNIKEFLKIMKSSAVDVECELTAGYKLFNDSQRITNELFIVKNIASMRKPAASAKLTMFRDALTILGIDDNITDDRISEILKLKEKGKGIHGLRNFITNNVIESSRFVYLIKYANAQKIREVAKNEKVVMFVLGGIPDTQIERYYKSCVEFPDMNSSLEVKRSELARMIKNISFDDFKNVKQQAKGRENVAKERAKAVIGLYLTVMYLLVKNLVNVNARYVIAIHCLERDFGLYKEIIPELASKNLKNDYRILSQTLCELCDXXESPNLFLKKNKRLRKCVEVDINNADSSMTRKYRNCIAHLTVVRELKEYIGDIRTVDSYFSIYHYVMQRCITKREDDTKQEEKIKYEDDLLKNHGYTKDFVKALNSPFGYNIPRFKNLSIEQLFDRNEYLTEK

SEQ ID NO: 107 - protein, 922 aa, Artificial Sequence
  M18_gut_metagenome_P22E0k2120140920_c3395000078
MAKKNKMKPRELREAQKKARQLKAAEINNNAAPAIAAMPAAEVIAPVAEKKKSSVKAAGMKSILVSENKMYITSFGKGNSAVLEYEVDNNDYNKTQLSSKDNSNIELGDVNEVNITFSSKHGFGSGVEINTSNPTHRSGESSPVRGDMLGLKSELEKRFFGKTFDDNIHIQLIYNILDIEKILAVYVTNIVYALNNMLGIKDSESYDDFMGYLSARNTYEVFTHPDKSNLSDKVKGNIKKSLSKFNDLLKTKRLGYFGLEEPKTKDTRASEAYKKRVYHMLAIVGQIRQCVFHDKSGAKRFDLYSFINNIDPEYRDTLDYLVEERLKSINKDFIEGNKVNISLLIDMMKGYEADDIIRLYYDFIVLKSQKNLGFSIKKLREKMLEEYGFRFKDKQYDSVRSKMYKLMDFLLFCNYYRNDVAAGEALVRKLRFSMTDDEKEGIYADEAAKLWGKFRNDFENIADHMNGDVIKELGKADMDFDEKILDSEKKNASDLLYFSKMIYMLTYFLDGKEINDLLTTLISKFDNIKEFLKIMKSSAVDVECELTAGYKLFNDSQRITNELFIVKNIASMRKPAASAKLTMFRDALTILGIDDNITDDRISEILKLKEKGKGIHGLRNFITNNVIESSRFVYLIKYANAQKIREVAKNEKVVMFVLGGIPDTQIERYYKSCVEFPDMNSSLEAKRSELARMIKNISFDDFKNVKQQAKGRENVAKERAKAVIGLYLTVMYLLVKNLVNVNARYVIAIHCLERDFGLYKEIIPELASKNLKNDYRILSQTLCELCDDRNESSNLFLKKNKRLRKCVEVDINNADSSMTRKYRNCIAHLTVVRELKEYIGDIRTVDSYFSIYHYVMQRCITKRGDDTKQEEKIKYEDDLLKNHGYTKDFVKALNSPFGYNIPRFKNLSIEQLFDRNEYLTEK

SEQ ID NO: 108 - protein, 922 aa, Artificial Sequence; identical to SEQ ID NO: 107
  M17_gut_metagenome_P22E90k2120140920_c114

SEQ ID NO: 109 - protein, 922 aa, Artificial Sequence
  Ruminococcus_sp_CAG57
MAKKNKMKPRELREAQKKARQLKAAEINNNAAPAIAAMPAAEVIAPVAEKKKSSVKAAGMKSILVSENKMYITSFGKGNSAVLEYEVDNNDYNKTQLSSKDNSNIELGDVNEVNITFSSKHGFGSGVEINTSNPTHRSGESSPVRGDMLGLKSELEKRFFGKTFDDNIHIQLIYNILDIEKILAVYVTNIVYALNNMLGIKDSESYDDFMGYLSARNTYEVFTHPDKSNLSDKVKGNIKKSLSKFNDLLKTKRLGYFGLEEPKTKDTRASEAYKKRVYHMLAIVGQIRQCVFHDKSGAKRFDLYSFINNIDPEYRDTLDYLVEERLKSINKDFIEGNKVNISLLIDMMKGYEADDIIRLYYDFIVLKSQKNLGFSIKKLREKMLEEYGFRFKDKQYDSVRSKMYKLMDFLLFCNYYRNDVAAGEALVRKLRFSMTDDEKEGIYADEAAKLWGKFRNDFENIADHMNGDVIKELGKADMDFDEKILDSEKKNASDLLYFSKMIYMLTYFLDGKEINDLLTTLISKFDNIKEFLKIMKSSAVDVECELTAGYKLFNDSQRITNELFIVKNIASMRKPAASAKLTMFRDALTILGIDDNITDDRISEILKLKEKGKGIHGLRNFITNNVIESSRFVYLIKYANAQKIREVAKDEKVVMFVLGGIPDTQIERYYKSCVEFPDMNSSLEAKRSELARMIKNISFDDFKNVKQQAKGRENVAKERAKAVIGLYLTVMYLLVKNLVNVNARYVIAIHCLERDFGLYKEIIPELASKNLKNDYRILSQTLCELCDDRNESSNLFLKKNKRLRKCVEVDINNADSSMTRKYRNCIAHLTVVRELKEYIGDIRTVDSYFSIYHYVMQRCITKRGDDTKQEEKIKYEDDLLKNHGYTKDFVKALNSPFGYNIPRFKNLSIEQLFDRNEYLTEK

SEQ ID NO: 110 - protein, 531 aa, Artificial Sequence
  gut_metagenome_P11E90k2120140920_c43000123
FRFKDKQYDSVRSKMYKLMDFLLFCNYYRNDVVAGEALVRKLRFSMTDDEKEGIYADEAAKLWGKFRNDFENIADHMNGDVIKELGKADMDFDEKILDSEKKNASDLLYFSKMIYMLTYFLDGKEINDLLTTLISKFDNIKEFLKIMKSSAVDVECELTAGYKLFNDSQRITNELFIVKNIASMRKPAASARLTMFRDALTILGIDDKITDDRISEILKLKEKGKGIHGLRNFITNNVIESSRFVYLIKYANAQKIREVAKNEKVVMFVLGGIPDTQIERYYKSCVEFPDMNSSLEAKRSELARMIKNISFDDFKNVKQQAKGRENVAKERAKAVIGLYLTVMYLLVKNLVNVNARYVIAIHCLERDFGLYKEIIPELASKNLKNDYRILSQTLCELCDKSPNLFLKKNERLRKCVEVDINNADSSMTRKYRNCIAHLTVVRELKEYIGDIRTVDSYFSIYHYVMQRCITKRENDTKQEDKIKYEDDLLKNHGYTKDFVKALNSPFGYNIPRFKNLSIEQLFDRNEYLTEK

SEQ ID NO: 111 - protein, 925 aa, Artificial Sequence
  M6_gut_metagenome_P13E90k2120140920_c7000009
MAKKNKMKPRELREAQKKARQLKAAEIKNNAVPAIAAMPAAEAAAPAVEKKKSSVKAAGMKSILVSENKMYITSFGKGNSAVLEYEVDKVDNNNYNKTQLSSKDNSNIELGDVNEVNITFSSKRGNESGVEINTSNPTHRSGESSPVRWDMLGLKSELEKRFFGKTFDDNIHIQLIYNILDIEKILAVYVTNIVYALNNMLGIKGSESYDDFMGYLSARNTYEVFTHPDKSNLSDKVKGNIKKSLSKFNDLLKTKRLGYFGLEEPKTKDTRVSQAYKKRVYHMLAIVGQIRQCVFHDKSGAKRFDLYSFINNIDPEYRDTLDYLVEERLKSINKDFIEGNKVNISLLIDMMKGYEADDIIRLYYDFIVLKSQKNLGFSIKKLREKMLEEYGYRFKDKQYDSVRSKMYKLMDFLLFCNYYRNDVVAGEALVRKLRFSMTDDEKEGIYADEASKLWGKFRNDFENIADHMNGDVIKELGKADMDFDEKILDSEKKNASDLLYFSKMIYMLTYFLDGKEINDLLTTLISKFDNIKEFLKIMKSSAVDVECELTAGYKLFNDSQRITNELFIVKNIASMRKPAASAKLTMFRDALTILGIDDKITDDRISEILKLKEKGKGIHGLRNFITNNVIESSRFVYLIKYANAQKIREVAKNEKVVMFVLGGIPDTQIERYYKSCVEFPDMNSSLEAKRSELARMIKNIRFDDFKNVKQQAKGRENVAKERAKAVIGLYLTVMYLLVKNLVNVNARYVIAIHCLERDFGLYKEIIPELASKNLKNDYRILSQTLCELCDDRDESPNLFLKKNKRLRKCVEVDINNADSSMTRKYRNCIAHLTVVRELKEYIGDIRTVDSYFSIYHYVMQRCITKREDDTKQEEKIKYEDDLLKNHGYTKDFVKALNSPFGYNIPRFKNLSIEQLFDRNEYLTEK

SEQ ID NO: 112 - protein, 921 aa, Artificial Sequence
  M19_gut_metagenome_P17E90k2120140920
MAKKNKMKPRERREAQKKARQLKAAEINNNAVPAIAAMHAAEVIAPAAEKKKSSVKAAGMKSILVSENKMYITSFGKGNSAVLEYEVDNNDYNQTQLSSKDNSNIELCGVTKVNITFSSKHGFESGVEINTSNPTHRSGESSPVRGDMLGLKSELEKRFFGKTFDDNIHIQLIYNILDIEKILAVYVTNIVYALNNMLGEGDESNYDFMGYLSTFNTYKVFTNPNGSTLSDDKKENIRKSLSKFNALLKTKRLGYFGLEEPKTKDTRASEAYKKRVYHMLAIVGQIRQCVFHDKSGAKRFDLYSFINNIYPEYRDTLDYLVEERLKSINKDFIQGNKVNISLLIDMMKGYEADDIIRLYYDFIVLKSQKNLGFSIKKLREKMLDEYGFRFKDKQYDSVRSKMYKLMDFLLFCNYYRNDVVAGEALVRKLRFSMTDDEKEGIYADEAAKLWGKFRNDFENIADHMNGDVIKELGKADMDFDEKILDSEKKNASDLLYFSKMIYMLTYFLDGKEINDLLTTLISKFDNIKEFLKIMKSSAVDVECELTAGYKLFNDSQRITNELFIVKNIASMRKPAASAKLTMFRDALTILGIDDKITDDRISEILKLKEKGKGIHGLRNFITNNVIESSRFVYLIKYANAQKIREVAKNEKVVMFVLGGIPDTQIERYYKSCVEFPDMNSSLEAKRSELARMIKNISFDDFKNVKQQAKGRENVAKERAKAVIGLYLTVMYLLVKNLVNVNARYVIAIHCLERDFGLYKEIIPELASKNLKNDYRILSQTLCELCDDRDESPNLFLKKNKRLRKCVEVDINNADSSMTRKYRNCIAHLTVVRELKKYIGDIRTVDSYFSIYHYVMQRCITKREDDTKQEEKIKYEDDLLKNHGYTKDFVKALNSPFGYNIPRFKNLSIEQLFDRNEYLTEK

SEQ ID NO: 113 - protein, 234 aa, Artificial Sequence
  gut_metagenome_P17E0k2120140920,_c87000043
MYFSKMIYMLTYFLDGKEINDLLTTLISKFDNIKEFLKIMKSSAVDVECELTAGYKLFNDSQRITNELFIVKNIASMRKPAASAKLTMFRDALTILGIDDKITDDRISEILKLKEKGKGIHGLRNFITNNVIESSRFVYLIKYANAQKIREVAKNEKVVMFVLGGIPDTQIERYYKSCVEFPDMNSSLEAKRSELARMIKNISFDDFKNVKQQAKGRENVAKERAKAVIGLYLT

SEQ ID NO: 114 - DNA, 2859 bp, Artificial Sequence
  Human codon-optimized Eubacterium siraeum nCas1
ggcaagaagatccatgccagggacctcagggagcaaagaaagaccgataggacagaaaagttcgccgatcagaacaagaagagggaggctgagagagctgtgcccaaaaaagacgccgccgtctccgtgaagagcgtgtccagcgtcagcagcaagaaggacaacgtcaccaagagcatggccaaggccgccggagtgaagtccgtctttgctgtgggaaacaccgtgtacatgacctccttcggcaggggcaacgatgccgtgctggagcagaaaatcgtggacacctcccatgagcccctgaatatcgacgatcccgcctatcaactcaacgtggtgaccatgaatggatacagcgtcacaggccatagaggagagacagtgtccgccgtgacagataatcccctgaggagattcaacggcaggaagaaggacgaacccgagcagagcgtccctacagacatgctctgcctgaagcccaccctcgagaaaaaattttttggaaaggagtttgatgacaacattcatattcagctgatctataatatcctggatatcgagaaaatcctggccgtgtactccaccaacgccatctacgctctcaacaacatgtccgccgacgaaaacatcgagaactccgacttcttcatgaaaagaacaacagacgagacctttgacgacttcgagaagaagaaggagagcaccaacagcagagagaaagctgactttgacgcctttgaaaagttcatcggaaactataggctggcctatttcgctgacgctttctacgtgaataaaaagaaccccaagggaaaggccaagaatgtcctgagggaggacaaggagctctacagcgtgctgacactgatcggaaagctgagacactggtgtgtccacagcgaggaaggaagggctgaattctggctgtacaagctggacgagctcaaagacgatttcaagaacgtcctggatgtggtgtataacagacccgtggaggagatcaacaacaggttcatcgaaaataacaaagtcaacatccagatcctgggctccgtgtataagaacaccgacatcgccgagctggtgaggtcctactatgagttcctgatcaccaaaaaatacaagaatatgggcttttccatcaagaagctcagggagagcatgctggagggcaagggctacgctgataaggagtacgatagcgtgagaaataagctgtaccagatgaccgatttcatcctctacaccggctacatcaacgaagatagcgatagggctgacgacctggtgaacacactgaggagctccctcaaggaggacgacaaaacaaccgtctactgcaaggaggccgattacctgtggaaaaagtacagggaaagcattagagaagtcgccgatgccctggatggcgacaacattaagaagctgtccaagagcaatattgagattcaggaggataagctgagaaaatgtttcattagctatgctgatagcgtgagcgagtttaccaagctgatctacctcctcacaagattcctgagcggcaaggagatcaatgacctggtgaccaccctgatcaacaagttcgataatattagatcctttctggagattatggatgaactgggcctggacaggacatttaccgccgagtacagcttcttcgaaggctccacaaagtacctggccgagctcgtggagctgaatagctttgtgaagtcctgctccttcgacatcaatgccaagaggaccatgtacagggacgccctggatatcctgggcatcgagtccgacaagaccgaggaggatattgagaagatgattgataatatcctgcagatcgacgccaacggagataaaaagctgaagaaaaacaacggactgagaaacttcatcgcttccaacgtcatcgacagcaatagattcaaatacctggtcaggtacggcaaccccaagaagattagagagacagccaagtgcaagcccgctgtgaggttcgtgctgaacgaaattcccgacgcccagatcgaaaggtactatgaggcttgctgccccaagaacaccgccctctgcagcgccaataagagaagggagaagctggccgacatgatcgctgagatcaaattcgagaattttagcgatgccggcaattaccagaaggctaacgtcacatccaggaccagcgaggccgagatcaagagaaaaaaccaggccattattaggctctatctgacagtgatgtatattatgctgaaaaacctggtgaacgtgaatgccaggtacgtcattgccttccactgcgtggaaagggacaccaagctgtacgccgaaagcggcctggaagtgggcaacatcgaaaagaacaaaacaaacctcaccatggccgtgatgggagtgaaactcgaaaacggaattatcaagacagagttcgataagagcttcgccgagaacgccgctaacagatacctgaggaacgccaggtggtataaactgatcctggacaacctgaaaaaatccgagagagccgtggtgaatgagttcagaaataccgtgtgccacctgaatgccatcaggaacatcaatatcaacatcaaggaaattaaggaggtggagaattatttcgctctgtaccactacctgatccagaagcacctggagaacaggttcgccgataagaaggtggaaagggatacaggcgatttcatcagcaaactggaggagcacaagacctattgcaaagactttgtgaaggcttactgcaccccctttggctacaacctggtgagatataagaatctcaccattgacggcctcttcgacaagaactaccctggcaaggatgactccgatgagcagaag

SEQ ID NO: 115 - DNA, 2862 bp, Artificial Sequence
  Human codon-optimized Eubacterium siraeum nCas1 HEPN-/-
ggcaagaagatccatgccagggacctcagggagcaaagaaagaccgataggacagaaaagttcgccgatcagaacaagaagagggaggctgagagagctgtgcccaaaaaagacgccgccgtctccgtgaagagcgtgtccagcgtcagcagcaagaaggacaacgtcaccaagagcatggccaaggccgccggagtgaagtccgtctttgctgtgggaaacaccgtgtacatgacctccttcggcaggggcaacgatgccgtgctggagcagaaaatcgtggacacctcccatgagcccctgaatatcgacgatcccgcctatcaactcaacgtggtgaccatgaatggatacagcgtcacaggccatagaggagagacagtgtccgccgtgacagataatcccctgaggagattcaacggcaggaagaaggacgaacccgagcagagcgtccctacagacatgctctgcctgaagcccaccctcgagaaaaaattttttggaaaggagtttgatgacaacattcatattcagctgatctataatatcctggatatcgagaaaatcctggccgtgtactccaccaacgccatctacgctctcaacaacatgtccgccgacgaaaacatcgagaactccgacttcttcatgaaaagaacaacagacgagacctttgacgacttcgagaagaagaaggagagcaccaacagcagagagaaagctgactttgacgcctttgaaaagttcatcggaaactataggctggcctatttcgctgacgctttctacgtgaataaaaagaaccccaagggaaaggccaagaatgtcctgagggaggacaaggagctctacagcgtgctgacactgatcggaaagctggcacactggtgtgtcgccagcgaggaaggaagggctgaattctggctgtacaagctggacgagctcaaagacgatttcaagaacgtcctggatgtggtgtataacagacccgtggaggagatcaacaacaggttcatcgaaaataacaaagtcaacatccagatcctgggctccgtgtataagaacaccgacatcgccgagctggtgaggtcctactatgagttcctgatcaccaaaaaatacaagaatatgggcttttccatcaagaagctcagggagagcatgctggagggcaagggctacgctgataaggagtacgatagcgtgagaaataagctgtaccagatgaccgatttcatcctctacaccggctacatcaacgaagatagcgatagggctgacgacctggtgaacacactgaggagctccctcaaggaggacgacaaaacaaccgtctactgcaaggaggccgattacctgtggaaaaagtacagggaaagcattagagaagtcgccgatgccctggatggcgacaacattaagaagctgtccaagagcaatattgagattcaggaggataagctgagaaaatgtttcattagctatgctgatagcgtgagcgagtttaccaagctgatctacctcctcacaagattcctgagcggcaaggagatcaatgacctggtgaccaccctgatcaacaagttcgataatattagatcctttctggagattatggatgaactgggcctggacaggacatttaccgccgagtacagcttcttcgaaggctccacaaagtacctggccgagctcgtggagctgaatagctttgtgaagtcctgctccttcgacatcaatgccaagaggaccatgtacagggacgccctggatatcctgggcatcgagtccgacaagaccgaggaggatattgagaagatgattgataatatcctgcagatcgacgccaacggagataaaaagctgaagaaaaacaacggactgagaaacttcatcgcttccaacgtcatcgacagcaatagattcaaatacctggtcaggtacggcaaccccaagaagattagagagacagccaagtgcaagcccgctgtgaggttcgtgctgaacgaaattcccgacgcccagatcgaaaggtactatgaggcttgctgccccaagaacaccgccctctgcagcgccaataagagaagggagaagctggccgacatgatcgctgagatcaaattcgagaattttagcgatgccggcaattaccagaaggctaacgtcacatccaggaccagcgaggccgagatcaagagaaaaaaccaggccattattaggctctatctgacagtgatgtatattatgctgaaaaacctggtgaacgtgaatgccaggtacgtcattgccttccactgcgtggaaagggacaccaagctgtacgccgaaagcggcctggaagtgggcaacatcgaaaagaacaaaacaaacctcaccatggccgtgatgggagtgaaactcgaaaacggaattatcaagacagagttcgataagagcttcgccgagaacgccgctaacagatacctgaggaacgccaggtggtataaactgatcctggacaacctgaaaaaatccgagagagccgtggtgaatgagttcgcaaataccgtgtgcgccctgaatgccatcaggaacatcaatatcaacatcaaggaaattaaggaggtggagaattatttcgctctgtaccactacctgatccagaagcacctggagaacaggttcgccgataagaaggtggaaagggatacaggcgatttcatcagcaaactggaggagcacaagacctattgcaaagactttgtgaaggcttactgcaccccctttggctacaacctggtgagatataagaatctcaccattgacggcctcttcgacaagaactaccctggcaaggatgactccgatgagcagaagtga

SEQ ID NO: 116 - DNA, 2892 bp, Artificial Sequence
  Human codon-optimized Eubacterium siraeum nCas1 with N-terminal NLS
agccccaagaagaagagaaaggtggaggccagcggcaagaagatccatgccagggacctcagggagcaaagaaagaccgataggacagaaaagttcgccgatcagaacaagaagagggaggctgagagagctgtgcccaaaaaagacgccgccgtctccgtgaagagcgtgtccagcgtcagcagcaagaaggacaacgtcaccaagagcatggccaaggccgccggagtgaagtccgtctttgctgtgggaaacaccgtgtacatgacctccttcggcaggggcaacgatgccgtgctggagcagaaaatcgtggacacctcccatgagcccctgaatatcgacgatcccgcctatcaactcaacgtggtgaccatgaatggatacagcgtcacaggccatagaggagagacagtgtccgccgtgacagataatcccctgaggagattcaacggcaggaagaaggacgaacccgagcagagcgtccctacagacatgctctgcctgaagcccaccctcgagaaaaaattttttggaaaggagtttgatgacaacattcatattcagctgatctataatatcctggatatcgagaaaatcctggccgtgtactccaccaacgccatctacgctctcaacaacatgtccgccgacgaaaacatcgagaactccgacttcttcatgaaaagaacaacagacgagacctttgacgacttcgagaagaagaaggagagcaccaacagcagagagaaagctgactttgacgcctttgaaaagttcatcggaaactataggctggcctatttcgctgacgctttctacgtgaataaaaagaaccccaagggaaaggccaagaatgtcctgagggaggacaaggagctctacagcgtgctgacactgatcggaaagctgagacactggtgtgtccacagcgaggaaggaagggctgaattctggctgtacaagctggacgagctcaaagacgatttcaagaacgtcctggatgtggtgtataacagacccgtggaggagatcaacaacaggttcatcgaaaataacaaagtcaacatccagatcctgggctccgtgtataagaacaccgacatcgccgagctggtgaggtcctactatgagttcctgatcaccaaaaaatacaagaatatgggcttttccatcaagaagctcagggagagcatgctggagggcaagggctacgctgataaggagtacgatagcgtgagaaataagctgtaccagatgaccgatttcatcctctacaccggctacatcaacgaagatagcgatagggctgacgacctggtgaacacactgaggagctccctcaaggaggacgacaaaacaaccgtctactgcaaggaggccgattacctgtggaaaaagtacagggaaagcattagagaagtcgccgatgccctggatggcgacaacattaagaagctgtccaagagcaatattgagattcaggaggataagctgagaaaatgtttcattagctatgctgatagcgtgagcgagtttaccaagctgatctacctcctcacaagattcctgagcggcaaggagatcaatgacctggtgaccaccctgatcaacaagttcgataatattagatcctttctggagattatggatgaactgggcctggacaggacatttaccgccgagtacagcttcttcgaaggctccacaaagtacctggccgagctcgtggagctgaatagctttgtgaagtcctgctccttcgacatcaatgccaagaggaccatgtacagggacgccctggatatcctgggcatcgagtccgacaagaccgaggaggatattgagaagatgattgataatatcctgcagatcgacgccaacggagataaaaagctgaagaaaaacaacggactgagaaacttcatcgcttccaacgtcatcgacagcaatagattcaaatacctggtcaggtacggcaaccccaagaagattagagagacagccaagtgcaagcccgctgtgaggttcgtgctgaacgaaattcccgacgcccagatcgaaaggtactatgaggcttgctgccccaagaacaccgccctctgcagcgccaataagagaagggagaagctggccgacatgatcgctgagatcaaattcgagaattttagcgatgccggcaattaccagaaggctaacgtcacatccaggaccagcgaggccgagatcaagagaaaaaaccaggccattattaggctctatctgacagtgatgtatattatgctgaaaaacctggtgaacgtgaatgccaggtacgtcattgccttccactgcgtggaaagggacaccaagctgtacgccgaaagcggcctggaagtgggcaacatcgaaaagaacaaaacaaacctcaccatggccgtgatgggagtgaaactcgaaaacggaattatcaagacagagttcgataagagcttcgccgagaacgccgctaacagatacctgaggaacgccaggtggtataaactgatcctggacaacctgaaaaaatccgagagagccgtggtgaatgagttcagaaataccgtgtgccacctgaatgccatcaggaacatcaatatcaacatcaaggaaattaaggaggtggagaattatttcgctctgtaccactacctgatccagaagcacctggagaacaggttcgccgataagaaggtggaaagggatacaggcgatttcatcagcaaactggaggagcacaagacctattgcaaagactttgtgaaggcttactgcaccccctttggctacaacctggtgagatataagaatctcaccattgacggcctcttcgacaagaactaccctggcaaggatgactccgatgagcagaag

SEQ ID NO: 117 - DNA, 2931 bp, Artificial Sequence
  Human codon-optimized Eubacterium siraeum nCas1 with N- and C-terminal NLS tags
agccccaagaagaagagaaaggtggaggccagcggcaagaagatccatgccagggacctcagggagcaaagaaagaccgataggacagaaaagttcgccgatcagaacaagaagagggaggctgagagagctgtgcccaaaaaagacgccgccgtctccgtgaagagcgtgtccagcgtcagcagcaagaaggacaacgtcaccaagagcatggccaaggccgccggagtgaagtccgtctttgctgtgggaaacaccgtgtacatgacctccttcggcaggggcaacgatgccgtgctggagcagaaaatcgtggacacctcccatgagcccctgaatatcgacgatcccgcctatcaactcaacgtggtgaccatgaatggatacagcgtcacaggccatagaggagagacagtgtccgccgtgacagataatcccctgaggagattcaacggcaggaagaaggacgaacccgagcagagcgtccctacagacatgctctgcctgaagcccaccctcgagaaaaaattttttggaaaggagtttgatgacaacattcatattcagctgatctataatatcctggatatcgagaaaatcctggccgtgtactccaccaacgccatctacgctctcaacaacatgtccgccgacgaaaacatcgagaactccgacttcttcatgaaaagaacaacagacgagacctttgacgacttcgagaagaagaaggagagcaccaacagcagagagaaagctgactttgacgcctttgaaaagttcatcggaaactataggctggcctatttcgctgacgctttctacgtgaataaaaagaaccccaagggaaaggccaagaatgtcctgagggaggacaaggagctctacagcgtgctgacactgatcggaaagctgagacactggtgtgtccacagcgaggaaggaagggctgaattctggctgtacaagctggacgagctcaaagacgatttcaagaacgtcctggatgtggtgtataacagacccgtggaggagatcaacaacaggttcatcgaaaataacaaagtcaacatccagatcctgggctccgtgtataagaacaccgacatcgccgagctggtgaggtcctactatgagttcctgatcaccaaaaaatacaagaatatgggcttttccatcaagaagctcagggagagcatgctggagggcaagggctacgctgataaggagtacgatagcgtgagaaataagctgtaccagatgaccgatttcatcctctacaccggctacatcaacgaagatagcgatagggctgacgacctggtgaacacactgaggagctccctcaaggaggacgacaaaacaaccgtctactgcaaggaggccgattacctgtggaaaaagtacagggaaagcattagagaagtcgccgatgccctggatggcgacaacattaagaagctgtccaagagcaatattgagattcaggaggataagctgagaaaatgtttcattagctatgctgatagcgtgagcgagtttaccaagctgatctacctcctcacaagattcctgagcggcaaggagatcaatgacctggtgaccaccctgatcaacaagttcgataatattagatcctttctggagattatggatgaactgggcctggacaggacatttaccgccgagtacagcttcttcgaaggctccacaaagtacctggccgagctcgtggagctgaatagctttgtgaagtcctgctccttcgacatcaatgccaagaggaccatgtacagggacgccctggatatcctgggcatcgagtccgacaagaccgaggaggatattgagaagatgattgataatatcctgcagatcgacgccaacggagataaaaagctgaagaaaaacaacggactgagaaacttcatcgcttccaacgtcatcgacagcaatagattcaaatacctggtcaggtacggcaaccccaagaagattagagagacagccaagtgcaagcccgctgtgaggttcgtgctgaacgaaattcccgacgcccagatcgaaaggtactatgaggcttgctgccccaagaacaccgccctctgcagcgccaataagagaagggagaagctggccgacatgatcgctgagatcaaattcgagaattttagcgatgccggcaattaccagaaggctaacgtcacatccaggaccagcgaggccgagatcaagagaaaaaaccaggccattattaggctctatctgacagtgatgtatattatgctgaaaaacctggtgaacgtgaatgccaggtacgtcattgccttccactgcgtggaaagggacaccaagctgtacgccgaaagcggcctggaagtgggcaacatcgaaaagaacaaaacaaacctcaccatggccgtgatgggagtgaaactcgaaaacggaattatcaagacagagttcgataagagcttcgccgagaacgccgctaacagatacctgaggaacgccaggtggtataaactgatcctggacaacctgaaaaaatccgagagagccgtggtgaatgagttcagaaataccgtgtgccacctgaatgccatcaggaacatcaatatcaacatcaaggaaattaaggaggtggagaattatttcgctctgtaccactacctgatccagaagcacctggagaacaggttcgccgataagaaggtggaaagggatacaggcgatttcatcagcaaactggaggagcacaagacctattgcaaagactttgtgaaggcttactgcaccccctttggctacaacctggtgagatataagaatctcaccattgacggcctcttcgacaagaactaccctggcaaggatgactccgatgagcagaagggatccggacctaagaaaaagaggaaggtggcggccgct

SEQ ID NO: 118 - DNA, 2754 bp, Artificial Sequence
  Human codon-optimized uncultured Ruminococcus sp. nCas1
gccaagaagaacaagatgaaacccagggagctgagagaggctcagaagaaggctaggcaactgaaagccgccgagatcaataacaatgccgcccctgccatcgccgctatgcccgctgccgaagtcatcgctcccgccgccgaaaagaagaagagctccgtgaaagccgctggaatgaagtccattctggtgtccgagaacaaaatgtatatcacctccttcggcaaaggcaattccgctgtgctggagtatgaggtggacaacaacgactacaatcagacccagctcagcagcaaggataactccaacatccagctgggcggcgtgaatgaagtgaatatcaccttcagcagcaagcacggatttgagtccggagtcgagattaacacaagcaaccctacccacaggtccggagaaagcagccctgtcagaggagacatgctgggactgaaaagcgagctggagaagagattctttggaaagacctttgatgacaatatccacatccagctcatttacaacatcctggatatcgagaaaatcctggccgtgtatgtgaccaacatcgtgtacgctctgaacaacatgctcggcgtcaagggcagcgagtcccacgacgactttattggctatctgtccaccaacaatatttacgatgtcttcattgaccccgacaacagcagcctctccgacgacaaaaaagccaacgtcaggaagagcctcagcaaattcaacgccctgctgaagaccaagaggctcggatactttggcctggaggaacccaagaccaaggacaacagagtgagccaggcctataagaaaagggtgtaccacatgctggccatcgtgggccagatcagacagtgcgtgttccatgacaagtccggcgccaagagattcgacctgtactccttcattaacaacatcgaccctgagtacagggatacactggattacctcgtggaggagaggctgaagagcatcaacaaagactttattgaggacaacaaagtcaacatcagcctgctgatcgatatgatgaagggctacgaagctgacgacatcatcaggctgtactatgatttcattgtcctgaagagccagaagaacctgggattctccattaagaaactgagagaaaagatgctcgacgagtacggcttcaggttcaaggacaagcagtatgacagcgtgagatccaagatgtacaagctgatggattttctcctgttttgcaactattacaggaacgacatcgccgccggcgaatccctggtcaggaaactgagattcagcatgaccgacgacgagaaggaaggcatctacgccgacgaagccgctaagctgtggggaaaatttagaaatgacttcgagaacatcgctgaccacatgaacggcgatgtgatcaaggagctcggcaaggctgacatggatttcgacgagaagatcctggattccgagaagaagaatgccagcgatctgctgtacttcagcaagatgatttacatgctcacatattttctcgatggcaaggagatcaacgatctcctgaccacactgatcagcaagttcgacaacattaaagagttcctcaaaattatgaaatccagcgccgtggatgtcgagtgcgaactcaccgccggctacaagctcttcaacgacagccagaggatcaccaatgagctgttcattgtgaaaaatatcgctagcatgaggaaacccgccgcctccgctaaactgacaatgtttagagatgccctcaccatcctgggcatcgacgataagatcacagacgacagaattagcggaatcctgaagctcaaggaaaagggcaagggaatccatggcctcagaaatttcattaccaataacgtgatcgaaagcagcaggttcgtgtatctgatcaagtacgccaatgcccaaaagatcagggaggtggccaagaacgaaaaggtggtgatgttcgtgctgggcggcattcctgacacacagatcgaaaggtactacaagagctgtgtggagttccccgatatgaactccagcctgggcgtgaagagatccgaactggctaggatgatcaagaatattagcttcgacgacttcaagaacgtgaagcaacaggccaaaggaagggagaacgtcgccaaagagagagccaaggccgtgatcggactctacctgaccgtcatgtacctcctcgtgaagaacctggtgaacgtgaacgctagatacgtcatcgccatccattgcctcgagagggacttcggactgtacaaggagatcattcccgagctggccagcaaaaatctcaagaacgattacagaatcctgagccaaaccctgtgcgagctgtgtgacaagtcccccaacctgtttctgaagaagaatgaaaggctgagaaagtgcgtcgaagtcgacatcaacaacgctgacagctccatgaccaggaaatacaggaactgtatcgcccatctgaccgtggtgagggaactcaaggagtacatcggagatatctgcaccgtggactcctacttcagcatttatcactacgtgatgcagaggtgcattaccaagagagaaaatgacacaaagcaggaggagaagattaagtacgaggacgatctgctgaaaaaccacggatacaccaaggatttcgtcaaggccctcaatagccccttcggctacaatatccctaggtttaaaaacctgagcatcgagcagctgtttgacagaaatgaatacctgacagagaag

SEQ ID NO: 119 - DNA, 2757 bp, Artificial Sequence
  Human codon-optimized uncultured Ruminococcus sp. nCas1 HEPN-/-
atggccaagaagaacaagatgaaacccagggagctgagagaggctcagaagaaggctaggcaactgaaagccgccgagatcaataacaatgccgcccctgccatcgccgctatgcccgctgccgaagtcatcgctcccgccgccgaaaagaagaagagctccgtgaaagccgctggaatgaagtccattctggtgtccgagaacaaaatgtatatcacctccttcggcaaaggcaattccgctgtgctggagtatgaggtggacaacaacgactacaatcagacccagctcagcagcaaggataactccaacatccagctgggcggcgtgaatgaagtgaatatcaccttcagcagcaagcacggatttgagtccggagtcgagattaacacaagcaaccctacccacaggtccggagaaagcagccctgtcagaggagacatgctgggactgaaaagcgagctggagaagagattctttggaaagacctttgatgacaatatccacatccagctcatttacaacatcctggatatcgagaaaatcctggccgtgtatgtgaccaacatcgtgtacgctctgaacaacatgctcggcgtcaagggcagcgagtcccacgacgactttattggctatctgtccaccaacaatatttacgatgtcttcattgaccccgacaacagcagcctctccgacgacaaaaaagccaacgtcaggaagagcctcagcaaattcaacgccctgctgaagaccaagaggctcggatactttggcctggaggaacccaagaccaaggacaacagagtgagccaggcctataagaaaagggtgtaccacatgctggccatcgtgggccagatcgcacagtgcgtgttcgctgacaagtccggcgccaagagattcgacctgtactccttcattaacaacatcgaccctgagtacagggatacactggattacctcgtggaggagaggctgaagagcatcaacaaagactttattgaggacaacaaagtcaacatcagcctgctgatcgatatgatgaagggctacgaagctgacgacatcatcaggctgtactatgatttcattgtcctgaagagccagaagaacctgggattctccattaagaaactgagagaaaagatgctcgacgagtacggcttcaggttcaaggacaagcagtatgacagcgtgagatccaagatgtacaagctgatggattttctcctgttttgcaactattacaggaacgacatcgccgccggcgaatccctggtcaggaaactgagattcagcatgaccgacgacgagaaggaaggcatctacgccgacgaagccgctaagctgtggggaaaatttagaaatgacttcgagaacatcgctgaccacatgaacggcgatgtgatcaaggagctcggcaaggctgacatggatttcgacgagaagatcctggattccgagaagaagaatgccagcgatctgctgtacttcagcaagatgatttacatgctcacatattttctcgatggcaaggagatcaacgatctcctgaccacactgatcagcaagttcgacaacattaaagagttcctcaaaattatgaaatccagcgccgtggatgtcgagtgcgaactcaccgccggctacaagctcttcaacgacagccagaggatcaccaatgagctgttcattgtgaaaaatatcgctagcatgaggaaacccgccgcctccgctaaactgacaatgtttagagatgccctcaccatcctgggcatcgacgataagatcacagacgacagaattagcggaatcctgaagctcaaggaaaagggcaagggaatccatggcctcagaaatttcattaccaataacgtgatcgaaagcagcaggttcgtgtatctgatcaagtacgccaatgcccaaaagatcagggaggtggccaagaacgaaaaggtggtgatgttcgtgctgggcggcattcctgacacacagatcgaaaggtactacaagagctgtgtggagttccccgatatgaactccagcctgggcgtgaagagatccgaactggctaggatgatcaagaatattagcttcgacgacttcaagaacgtgaagcaacaggccaaaggaagggagaacgtcgccaaagagagagccaaggccgtgatcggactctacctgaccgtcatgtacctcctcgtgaagaacctggtgaacgtgaacgctagatacgtcatcgccatccattgcctcgagagggacttcggactgtacaaggagatcattcccgagctggccagcaaaaatctcaagaacgattacagaatcctgagccaaaccctgtgcgagctgtgtgacaagtcccccaacctgtttctgaagaagaatgaaaggctgagaaagtgcgtcgaagtcgacatcaacaacgctgacagctccatgaccaggaaatacgcgaactgtatcgccgctctgaccgtggtgagggaactcaaggagtacatcggagatatctgcaccgtggactcctacttcagcatttatcactacgtgatgcagaggtgcattaccaagagagaaaatgacacaaagcaggaggagaagattaagtacgaggacgatctgctgaaaaaccacggatacaccaaggatttcgtcaaggccctcaatagccccttcggctacaatatccctaggtttaaaaacctgagcatcgagcagctgtttgacagaaatgaatacctgacagagaag

SEQ ID NO: 120 - DNA, 2787 bp, Artificial Sequence
  Human codon-optimized uncultured Ruminococcus sp. nCas1 with N-terminal NLS
agccccaagaagaagagaaaggtggaggccagcgccaagaagaacaagatgaaacccagggagctgagagaggctcagaagaaggctaggcaactgaaagccgccgagatcaataacaatgccgcccctgccatcgccgctatgcccgctgccgaagtcatcgctcccgccgccgaaaagaagaagagctccgtgaaagccgctggaatgaagtccattctggtgtccgagaacaaaatgtatatcacctccttcggcaaaggcaattccgctgtgctggagtatgaggtggacaacaacgactacaatcagacccagctcagcagcaaggataactccaacatccagctgggcggcgtgaatgaagtgaatatcaccttcagcagcaagcacggatttgagtccggagtcgagattaacacaagcaaccctacccacaggtccggagaaagcagccctgtcagaggagacatgctgggactgaaaagcgagctggagaagagattctttggaaagacctttgatgacaatatccacatccagctcatttacaacatcctggatatcgagaaaatcctggccgtgtatgtgaccaacatcgtgtacgctctgaacaacatgctcggcgtcaagggcagcgagtcccacgacgactttattggctatctgtccaccaacaatatttacgatgtcttcattgaccccgacaacagcagcctctccgacgacaaaaaagccaacgtcaggaagagcctcagcaaattcaacgccctgctgaagaccaagaggctcggatactttggcctggaggaacccaagaccaaggacaacagagtgagccaggcctataagaaaagggtgtaccacatgctggccatcgtgggccagatcagacagtgcgtgttccatgacaagtccggcgccaagagattcgacctgtactccttcattaacaacatcgaccctgagtacagggatacactggattacctcgtggaggagaggctgaagagcatcaacaaagactttattgaggacaacaaagtcaacatcagcctgctgatcgatatgatgaagggctacgaagctgacgacatcatcaggctgtactatgatttcattgtcctgaagagccagaagaacctgggattctccattaagaaactgagagaaaagatgctcgacgagtacggcttcaggttcaaggacaagcagtatgacagcgtgagatccaagatgtacaagctgatggattttctcctgttttgcaactattacaggaacgacatcgccgccggcgaatccctggtcaggaaactgagattcagcatgaccgacgacgagaaggaaggcatctacgccgacgaagccgctaagctgtggggaaaatttagaaatgacttcgagaacatcgctgaccacatgaacggcgatgtgatcaaggagctcggcaaggctgacatggatttcgacgagaagatcctggattccgagaagaagaatgccagcgatctgctgtacttcagcaagatgatttacatgctcacatattttctcgatggcaaggagatcaacgatctcctgaccacactgatcagcaagttcgacaacattaaagagttcctcaaaattatgaaatccagcgccgtggatgtcgagtgcgaactcaccgccggctacaagctcttcaacgacagccagaggatcaccaatgagctgttcattgtgaaaaatatcgctagcatgaggaaacccgccgcctccgctaaactgacaatgtttagagatgccctcaccatcctgggcatcgacgataagatcacagacgacagaattagcggaatcctgaagctcaaggaaaagggcaagggaatccatggcctcagaaatttcattaccaataacgtgatcgaaagcagcaggttcgtgtatctgatcaagtacgccaatgcccaaaagatcagggaggtggccaagaacgaaaaggtggtgatgttcgtgctgggcggcattcctgacacacagatcgaaaggtactacaagagctgtgtggagttccccgatatgaactccagcctgggcgtgaagagatccgaactggctaggatgatcaagaatattagcttcgacgacttcaagaacgtgaagcaacaggccaaaggaagggagaacgtcgccaaagagagagccaaggccgtgatcggactctacctgaccgtcatgtacctcctcgtgaagaacctggtgaacgtgaacgctagatacgtcatcgccatccattgcctcgagagggacttcggactgtacaaggagatcattcccgagctggccagcaaaaatctcaagaacgattacagaatcctgagccaaaccctgtgcgagctgtgtgacaagtcccccaacctgtttctgaagaagaatgaaaggctgagaaagtgcgtcgaagtcgacatcaacaacgctgacagctccatgaccaggaaatacaggaactgtatcgcccatctgaccgtggtgagggaactcaaggagtacatcggagatatctgcaccgtggactcctacttcagcatttatcactacgtgatgcagaggtgcattaccaagagagaaaatgacacaaagcaggaggagaagattaagtacgaggacgatctgctgaaaaaccacggatacaccaaggatttcgtcaaggccctcaatagccccttcggctacaatatccctaggtttaaaaacctgagcatcgagcagctgtttgacagaaatgaatacctgacagagaag

SEQ ID NO: 121 - DNA, 2826 bp, Artificial Sequence
  Human codon-optimized uncultured Ruminococcus sp. nCas1 with N-and C-terminal NLS tags
agccccaagaagaagagaaaggtggaggccagcgccaagaagaacaagatgaaacccagggagctgagagaggctcagaagaaggctaggcaactgaaagccgccgagatcaataacaatgccgcccctgccatcgccgctatgcccgctgccgaagtcatcgctcccgccgccgaaaagaagaagagctccgtgaaagccgctggaatgaagtccattctggtgtccgagaacaaaatgtatatcacctccttcggcaaaggcaattccgctgtgctggagtatgaggtggacaacaacgactacaatcagacccagctcagcagcaaggataactccaacatccagctgggcggcgtgaatgaagtgaatatcaccttcagcagcaagcacggatttgagtccggagtcgagattaacacaagcaaccctacccacaggtccggagaaagcagccctgtcagaggagacatgctgggactgaaaagcgagctggagaagagattctttggaaagacctttgatgacaatatccacatccagctcatttacaacatcctggatatcgagaaaatcctggccgtgtatgtgaccaacatcgtgtacgctctgaacaacatgctcggcgtcaagggcagcgagtcccacgacgactttattggctatctgtccaccaacaatatttacgatgtcttcattgaccccgacaacagcagcctctccgacgacaaaaaagccaacgtcaggaagagcctcagcaaattcaacgccctgctgaagaccaagaggctcggatactttggcctggaggaacccaagaccaaggacaacagagtgagccaggcctataagaaaagggtgtaccacatgctggccatcgtgggccagatcagacagtgcgtgttccatgacaagtccggcgccaagagattcgacctgtactccttcattaacaacatcgaccctgagtacagggatacactggattacctcgtggaggagaggctgaagagcatcaacaaagactttattgaggacaacaaagtcaacatcagcctgctgatcgatatgatgaagggctacgaagctgacgacatcatcaggctgtactatgatttcattgtcctgaagagccagaagaacctgggattctccattaagaaactgagagaaaagatgctcgacgagtacggcttcaggttcaaggacaagcagtatgacagcgtgagatccaagatgtacaagctgatggattttctcctgttttgcaactattacaggaacgacatcgccgccggcgaatccctggtcaggaaactgagattcagcatgaccgacgacgagaaggaaggcatctacgccgacgaagccgctaagctgtggggaaaatttagaaatgacttcgagaacatcgctgaccacatgaacggcgatgtgatcaaggagctcggcaaggctgacatggatttcgacgagaagatcctggattccgagaagaagaatgccagcgatctgctgtacttcagcaagatgatttacatgctcacatattttctcgatggcaaggagatcaacgatctcctgaccacactgatcagcaagttcgacaacattaaagagttcctcaaaattatgaaatccagcgccgtggatgtcgagtgcgaactcaccgccggctacaagctcttcaacgacagccagaggatcaccaatgagctgttcattgtgaaaaatatcgctagcatgaggaaacccgccgcctccgctaaactgacaatgtttagagatgccctcaccatcctgggcatcgacgataagatcacagacgacagaattagcggaatcctgaagctcaaggaaaagggcaagggaatccatggcctcagaaatttcattaccaataacgtgatcgaaagcagcaggttcgtgtatctgatcaagtacgccaatgcccaaaagatcagggaggtggccaagaacgaaaaggtggtgatgttcgtgctgggcggcattcctgacacacagatcgaaaggtactacaagagctgtgtggagttccccgatatgaactccagcctgggcgtgaagagatccgaactggctaggatgatcaagaatattagcttcgacgacttcaagaacgtgaagcaacaggccaaaggaagggagaacgtcgccaaagagagagccaaggccgtgatcggactctacctgaccgtcatgtacctcctcgtgaagaacctggtgaacgtgaacgctagatacgtcatcgccatccattgcctcgagagggacttcggactgtacaaggagatcattcccgagctggccagcaaaaatctcaagaacgattacagaatcctgagccaaaccctgtgcgagctgtgtgacaagtcccccaacctgtttctgaagaagaatgaaaggctgagaaagtgcgtcgaagtcgacatcaacaacgctgacagctccatgaccaggaaatacaggaactgtatcgcccatctgaccgtggtgagggaactcaaggagtacatcggagatatctgcaccgtggactcctacttcagcatttatcactacgtgatgcagaggtgcattaccaagagagaaaatgacacaaagcaggaggagaagattaagtacgaggacgatctgctgaaaaaccacggatacaccaaggatttcgtcaaggccctcaatagccccttcggctacaatatccctaggtttaaaaacctgagcatcgagcagctgtttgacagaaatgaatacctgacagagaagggatccggacctaagaaaaagaggaaggtggcggccgct

SEQ ID NO: 122 - DNA, 2803 bp, Artificial Sequence
  Human codon-optimized Ruminococcus flavefaciens FD1 nCas1
aagaaaaaaatgagcctcagagagaagagggaagccgagaaacaagccaaaaaagccgcctacagcgctgcctccaaaaacacagatagcaaacctgctgagaagaaggccgagacacccaagcctgctgagattatttccgacaactccagaaacaaaaccgccgtcaaggccgccggcctgaaatccacaattatctccggcgataagctgtacatgaccagcttcggaaagggcaacgccgccgtgatcgagcagaaaattgatattaatgattactccttctccgccatgaaggatacccccagcctggaagtggacaaggccgagagcaaggagatctccttctccagccaccacccttttgtcaaaaatgataaactgaccacctataatcccctgtacggcggaaaagataaccccgaaaagcccgtgggcagagatatgctcggcctcaaagacaagctcgaggagaggtacttcggatgcaccttcaatgacaacctgcacattcagattatctataacatcctcgacattgagaaaattctggccgtgcactccgccaacattaccacagctctggaccacatggtggacgaggacgatgagaagtacctcaatagcgattacattggctacatgaacaccatcaacacctatgatgtgttcatggacccctccaaaaattcctccctctcccccaaggacaggaagaacattgataacagcagggccaagtttgagaagctcctgtccacaaagaggctcggctactttggctttgactacgatgccaacggcaaggataagaagaaaaacgaggagatcaagaaaaggctctatcacctgacagcctttgccggccagctcaggcagtggtccttccatagcgccggcaattatcccagaacctggctctacaagctcgatagcctggacaaagagtatctcgacaccctggaccattattttgataagagattcaacgatattaatgacgatttcgtcaccaagaacgccacaaacctgtacatcctgaaggaggtcttccccgaggctaatttcaaggatatcgccgatctctactacgatttcattgtcatcaaaagccataagaatatgggattttccatcaagaagctgagggagaagatgctggagtgcgatggagctgatagaatcaaggaacaggacatggactccgtgaggagcaagctgtataagctgatcgatttttgcattttcaaatactaccacgagttccctgagctgagcgagaagaacgtcgacatcctcagggctgccgtgagcgataccaaaaaggacaacctgtatagcgacgaggccgctaggctctggagcatcttcaaggaaaagttcctgggcttctgcgacaagattgtggtgtgggtgaccggcgagcacgagaaagacatcacctccgtgattgacaaggacgcttacaggaacaggtccaacgtgagctacttttccaagctgatgtacgccatgtgtttcttcctggatggaaaggaaattaacgatctgctgaccacactgatcaacaaattcgacaacattgccaaccagatcaagaccgccaaggagctcggcattaacaccgccttcgtgaaaaactacgattttttcaaccacagcgaaaagtacgtggacgagctgaacattgtgaaaaacatcgccaggatgaaaaagccctccagcaacgccaagaaggccatgtaccatgacgccctgacaatcctgggcatccccgaggatatggacgagaaggccctggatgaggagctcgatctcatcctggaaaagaagaccgatcccgtgaccggaaagcccctcaaaggcaaaaatcccctgaggaattttatcgctaataatgtgattgagaatagcaggttcatttacctgattaaattttgcaaccctgagaatgtcaggaaaatcgtgaacaacacaaaggtgaccgagttcgtgctcaagaggatccccgatgcccagatcgagaggtactacaagagctgtaccgattccgagatgaaccctcccacagaaaagaagatcaccgagctggccggcaagctgaaagatatgaattttggaaacttcaggaacgtgaggcagtccgccaaggaaaacatggagaaagagaggttcaaggccgtcattggcctgtacctcaccgtcgtctacagagtggtcaaaaacctggtggacgtcaatagcaggtacatcatggccttccatagcctggagagagattcccagctgtacaacgtgagcgtcgataatgattacctggccctcaccgacaccctggtcaaggagggcgacaacagcaggtccaggtacctggccggaaataaaaggctgagggattgcgtgaagcaagacatcgacaatgccaaaaagtggttcgtctccgacaagtacaactccattacaaagtacaggaacaacgtggcccacctgaccgccgtgagaaactgcgccgagttcatcggcgacattaccaagatcgactcctacttcgccctctaccactacctcattcagagacagctggctaagggcctcgatcatgagaggtccggattcgacaggaattacccccagtacgcccctctgttcaaatggcacacctacgtgaaggatgtcgtcaaggccctgaacgcccccttcggatacaatatccctaggttcaagaatctgagcatcgacgccctctttgataggaatgaaatcaagaagaacgatggcgagaagaagtccgacgactgagcct

SEQ ID NO: 123 - DNA, 2799 bp, Artificial Sequence
  Human codon-optimized Ruminococcus flavefaciens FD1 nCas1 HEPN-/-
aagaaaaaaatgagcctcagagagaagagggaagccgagaaacaagccaaaaaagccgcctacagcgctgcctccaaaaacacagatagcaaacctgctgagaagaaggccgagacacccaagcctgctgagattatttccgacaactccagaaacaaaaccgccgtcaaggccgccggcctgaaatccacaattatctccggcgataagctgtacatgaccagcttcggaaagggcaacgccgccgtgatcgagcagaaaattgatattaatgattactccttctccgccatgaaggatacccccagcctggaagtggacaaggccgagagcaaggagatctccttctccagccaccacccttttgtcaaaaatgataaactgaccacctataatcccctgtacggcggaaaagataaccccgaaaagcccgtgggcagagatatgctcggcctcaaagacaagctcgaggagaggtacttcggatgcaccttcaatgacaacctgcacattcagattatctataacatcctcgacattgagaaaattctggccgtgcactccgccaacattaccacagctctggaccacatggtggacgaggacgatgagaagtacctcaatagcgattacattggctacatgaacaccatcaacacctatgatgtgttcatggacccctccaaaaattcctccctctcccccaaggacaggaagaacattgataacagcagggccaagtttgagaagctcctgtccacaaagaggctcggctactttggctttgactacgatgccaacggcaaggataagaagaaaaacgaggagatcaagaaaaggctctatcacctgacagcctttgccggccagctcgcgcagtggtccttcgctagcgccggcaattatcccagaacctggctctacaagctcgatagcctggacaaagagtatctcgacaccctggaccattattttgataagagattcaacgatattaatgacgatttcgtcaccaagaacgccacaaacctgtacatcctgaaggaggtcttccccgaggctaatttcaaggatatcgccgatctctactacgatttcattgtcatcaaaagccataagaatatgggattttccatcaagaagctgagggagaagatgctggagtgcgatggagctgatagaatcaaggaacaggacatggactccgtgaggagcaagctgtataagctgatcgatttttgcattttcaaatactaccacgagttccctgagctgagcgagaagaacgtcgacatcctcagggctgccgtgagcgataccaaaaaggacaacctgtatagcgacgaggccgctaggctctggagcatcttcaaggaaaagttcctgggcttctgcgacaagattgtggtgtgggtgaccggcgagcacgagaaagacatcacctccgtgattgacaaggacgcttacaggaacaggtccaacgtgagctacttttccaagctgatgtacgccatgtgtttcttcctggatggaaaggaaattaacgatctgctgaccacactgatcaacaaattcgacaacattgccaaccagatcaagaccgccaaggagctcggcattaacaccgccttcgtgaaaaactacgattttttcaaccacagcgaaaagtacgtggacgagctgaacattgtgaaaaacatcgccaggatgaaaaagccctccagcaacgccaagaaggccatgtaccatgacgccctgacaatcctgggcatccccgaggatatggacgagaaggccctggatgaggagctcgatctcatcctggaaaagaagaccgatcccgtgaccggaaagcccctcaaaggcaaaaatcccctgaggaattttatcgctaataatgtgattgagaatagcaggttcatttacctgattaaattttgcaaccctgagaatgtcaggaaaatcgtgaacaacacaaaggtgaccgagttcgtgctcaagaggatccccgatgcccagatcgagaggtactacaagagctgtaccgattccgagatgaaccctcccacagaaaagaagatcaccgagctggccggcaagctgaaagatatgaattttggaaacttcaggaacgtgaggcagtccgccaaggaaaacatggagaaagagaggttcaaggccgtcattggcctgtacctcaccgtcgtctacagagtggtcaaaaacctggtggacgtcaatagcaggtacatcatggccttccatagcctggagagagattcccagctgtacaacgtgagcgtcgataatgattacctggccctcaccgacaccctggtcaaggagggcgacaacagcaggtccaggtacctggccggaaataaaaggctgagggattgcgtgaagcaagacatcgacaatgccaaaaagtggttcgtctccgacaagtacaactccattacaaagtacgcgaacaacgtggccgccctgaccgccgtgagaaactgcgccgagttcatcggcgacattaccaagatcgactcctacttcgccctctaccactacctcattcagagacagctggctaagggcctcgatcatgagaggtccggattcgacaggaattacccccagtacgcccctctgttcaaatggcacacctacgtgaaggatgtcgtcaaggccctgaacgcccccttcggatacaatatccctaggttcaagaatctgagcatcgacgccctctttgataggaatgaaatcaagaagaacgatggcgagaagaagtccgacgactga

SEQ ID NO: 124 - DNA, 2757 bp, Artificial Sequence
  Ruminococcus bicirculans nCas1 sequence
atggcaaaaaagaataaaatgaagcctagagagctgcgtgaggctcagaaaaaagccagacagctcaaagcggctgagataaataataacgctgttcctgcaatcgctgccatgcctgctgcagaggctgctgcacctgcggcagagaagaaaaaatcctccgtaaaggcggcaggaatgaagtctattcttgtcagtgaaaataaaatgtacataacctctttcggcaagggcaattctgcggtgcttgaatatgaggtggataataatgactacaacaaaactcagctttcctcaaaggacaacagtaatatcgagctctgtgatgtaggcaaagtaaacatcactttttcgagcagacgtggctttgagagcggtgtggagataaacacttcaaaccctactcacagaagcggtgaaagctcgtctgtaagaggggatatgctggggcttaaatcggagcttgaaaagcgctttttcggcaagaattttgatgataatatacatatccagcttatttacaacattctggatatcgaaaagatacttgcagtgtatgtgacgaatatcgtttatgcactgaacaatatgcttggggaaggcgatgagagcaattacgatttcatggggtatctttccacatttaacacttataaagtttttactaatcctaatggcagcactttatccgacgataagaaagagaatatcagaaaaagtcttagcaaattcaatgccctgctgaaaactaagcgtcttggctatttcggccttgaagagccaaagacaaaggatacaagagcttcggaagcatacaaaaagcgtgtttatcatatgcttgcaattgtggggcagataagacagtgtgtttttcatgataaatcgggtgcaaaaagatttgacctttacagttttattaacaatattgatcccgaatacagagaaacccttgactatcttgtagatgagagatttgattctataaataagggctttatccagggcaacaaggtcaatatcagcttgcttattgatatgatgaaaggctatgaggctgatgatatcatacgcctttattacgatttcattgtgcttaaatctcagaaaaatctcggtttttctatcaaaaagcttcgtgagaaaatgctggacgaatacggcttcagatttaaggacaagcaatatgactctgtgcgctcaaagatgtacaagcttatggattttctgcttttctgcaactactacagaaatgacattgccgcaggcgaatctcttgtgcgcaaactgcgtttttcaatgaccgatgatgaaaaagaggggatatatgctgatgaagcggcaaagctttggggcaaattcaggaatgattttgaaaatatcgccgaccacatgaacggtgacgttatcaaggagcttggcaaggctgacatggattttgatgagaaaattcttgacagcgaaaagaagaatgcgtctgaccttttgtatttctccaaaatgatatatatgctcacatattttcttgacggcaaggagataaacgaccttcttacaacgcttatcagcaagtttgataacatcaaggagtttttgaagataatgaaaagctctgctgttgatgttgagtgtgaacttacggcgggctacaagctgttcaatgacagccagaggataaccaacgagctttttatcgtaaagaacattgcttccatgagaaagcctgcggcttcggcgaagcttacgatgttccgtgacgcactgactatactcggtatagacgacaagatcacggacgataggataagcgagattctaaaacttaaagaaaaaggcaagggcatacatggcctgagaaatttcataacaaacaatgttatcgagtcctctcggtttgtataccttatcaagtatgcgaacgctcagaagataagagaagtggctaagaatgagaaagttgtcatgtttgttcttgggggtatccctgacacgcagatagagcgttattacaagagttgtgtggaatttcctgacatgaacagttctttgggagtaaagcgcagtgagcttgcgagaatgataaagaacatcagctttgatgatttcaaaaatgtgaaacagcaggcaaagggcagagaaaacgtggctaaggagagggcaaaggctgttatcgggctttatcttacggtcatgtatctgctggtgaaaaatcttgtgaatgtcaatgcaaggtatgttattgcgatacactgccttgaacgtgattttgggctgtataaggagataattcctgagttggcttcaaagaacttgaaaaatgactacaggatactttcacagacgctttgtgaactttgtgataagtcgccgaatttgttcttgaaaaagaacgagcggctgcgcaagtgcgttgaagttgatatcaataatgcagacagcagcatgacaagaaaataccgcaactgtattgctcatcttactgtagttcgtgaactgaaagaatacataggagatatttgtacagtggattcttacttctccatttatcattatgttatgcagcgctgtatcacgaaaagggaaaatgacacaaagcaagaagagaaaataaagtatgaggacgatcttttaaaaaatcacggctatacgaaagactttgtaaaggctctcaactcgccgtttggatacaacattccgaggtttaaaaatctttcaattgagcagttgtttgacagaaatgaatatcttactgaaaagtag

SEQ ID NO: 125 - DNA, 2865 bp, Artificial Sequence
  Eubacterium siraeum nCas1 sequence
atgggtaagaaaatacacgcacgagatctcagagaacaaagaaagaccgatagaacggaaaaatttgcagatcagaacaaaaaacgtgaagcagagagggcagttccgaaaaaagacgcagccgtttctgtaaaatcagtttcttctgtttcatcaaaaaaagacaatgtaacaaaatctatggctaaagccgcaggcgtgaagtcggtttttgctgtaggaaatactgtttatatgacttcattcggcagaggaaacgatgctgtacttgagcagaaaatagtcgatacatcgcacgaaccgctgaatattgacgatcctgcatatcagttgaacgttgtcacaatgaacggttattcggttaccggtcacagaggtgaaacggtatctgccgtaacggataatccgctgcgccgttttaacggaagaaagaaagatgaaccggaacagtctgtgcctacggatatgctgtgcctgaaaccgactcttgaaaagaaattcttcggcaaagaattcgatgataatatacatatccagcttatttacaatattcttgacattgaaaaaatactggcggtttattcgaccaacgctatttacgcattgaataatatgagtgctgacgaaaatatcgaaaacagcgatttcttcatgaaacgtaccaccgatgaaacctttgacgattttgaaaagaaaaaggagagtacaaacagtcgagagaaagccgattttgacgcatttgaaaaattcatcggcaattacaggctggcttattttgccgatgcattttatgtaaataaaaagaatcccaaaggtaaagcaaaaaatgttctgcgtgaggataaagaactttactccgtgctcactctgatcggtaaactgcgtcattggtgtgttcacagtgaggagggcagagcagaattctggctgtataagctcgatgaacttaaagatgatttcaaaaatgtactcgacgttgtttataaccgtcctgttgaagaaataaacaaccgctttatagaaaacaataaggtaaacatacagatactgggctcggtatacaagaacaccgatattgccgaacttgtaaggtcatattacgaatttcttatcacaaagaagtataaaaatatgggcttttcaataaagaagctccgtgagagtatgctcgaaggtaaaggttacgccgataaagaatatgattctgtaaggaataagctgtatcagatgacggatttcatcttatacacaggatatatcaacgaagacagcgatagagccgacgatcttgtgaacactttgagaagttcgctcaaagaggatgataagacaaccgtatattgcaaggaagcggattatctgtggaaaaaataccgtgaatccataagagaggttgccgatgcgcttgatggcgataacattaaaaagctgagcaaatcgaatattgaaattcaggaagacaagctgagaaaatgttttatcagctatgccgacagcgtatcggaatttaccaagcttatttatctgctgacaagatttttaagcggtaaggagatcaacgatcttgtcacaacgctgataaacaagtttgacaatatcagaagcttccttgaaataatggacgagcttgggcttgacaggaccttcaccgccgagtacagcttctttgaaggcagtacaaagtatcttgccgagcttgtcgagcttaacagctttgtgaaatcgtgttcgtttgatataaacgcaaaaagaacaatgtatcgcgatgcgctggatattctcggcattgaatcggataagaccgaagaagatattgagaagatgatcgataatatccttcagatcgacgcaaacggtgataaaaagctcaagaaaaacaacggtctgagaaatttcattgcaagtaacgttatagattcaaaccgattcaagtaccttgtgcggtacggaaatccaaagaagattcgtgaaacggcaaaatgcaagcccgctgtaaggtttgtgctgaatgagatcccggacgcacagatcgaaagatattatgaggcttgttgcccaaaaaatacagctttatgctctgcaaataagagacgtgagaaactggctgatatgatagctgaaataaagtttgagaatttttcggatgccggcaattatcagaaagcaaatgtcacatcaagaacgtctgaagctgaaatcaagcggaagaatcaggctataatccgtctttatcttaccgttatgtacattatgctgaagaaccttgtaaatgtgaacgccagatacgttatcgctttccattgcgttgaaagggatacgaagctgtatgcggaaagcggtctggaagtcggtaatatagaaaaaaacaagacaaatcttactatggctgtaatgggagtcaagctcgaaaacggaatcataaaaacggaatttgacaagagctttgcagaaaatgccgcaaacagatatctcaggaatgcacgctggtacaagctgatactggataatttaaagaagtcggaaagagcggttgtcaatgagttcagaaatactgtctgccatctgaatgcgataaggaatatcaatatcaatatcaaggaaataaaagaggtcgagaactactttgctctgtaccactacctcattcagaaacatctcgaaaatcgttttgccgataaaaaagtagaaagagacaccggcgattttataagcaagctcgaagaacacaagacttactgcaaggactttgtaaaagcatattgtacgcctttcggatataaccttgtgagatataaaaaccttacgatagacgggctgtttgataagaattaccccggaaaagacgattctgatgaacagaaataa

SEQ ID NO: 126 - DNA, 2799 bp, Artificial Sequence
  Ruminococcus flavefaciens FD1 nCas1 sequence
atgaaaaagaaaatgtctctccgtgaaaagcgtgaagccgagaaacaggctaaaaaagctgcatattcagcagcttcaaaaaatacagattctaagcctgcggaaaagaaagcagaaactccaaagcctgcggagattatttccgataattccagaaataagaccgctgtaaaggcggctggtctgaaatcaacaattatcagcggcgataagctgtatatgacatctttcggcaagggtaacgctgctgttattgagcagaaaatagatatcaatgattattctttttcagctatgaaagatactccgtcgcttgaagttgataaagcagaatcaaaagagatctctttttcaagtcaccatccttttgtaaagaatgataagctgacaacatataaccctttatacggcggcaaggataaccccgaaaagcctgtcggcagggatatgctcggcttaaaagataagcttgaagaacgctatttcggatgtacattcaatgataatcttcacatccagattatctataacatacttgacatcgagaagattttagctgttcattctgcaaatatcacaactgcgcttgaccacatggttgatgaagacgatgaaaaatatcttaacagcgattatatcggctacatgaataccataaatacatatgacgtgtttatggatccttcaaagaattcttcattaagccctaaagatagaaagaatattgacaacagccgtgcaaaatttgagaaactgctttcaactaagcgccttggctattttggatttgactatgatgcaaacggtaaggacaagaaaaagaacgaggaaataaaaaagcgtttatatcatctcacagcttttgcaggtcagctccgtcagtggagttttcatagtgctggcaattatccgagaacatggctttacaagctcgattcactggataaggaatatcttgatactcttgaccattacttcgataaacgttttaacgatataaacgatgatttcgtaactaagaatgctaccaatctctatattctgaaagaagtatttcccgaagcaaacttcaaggatattgccgatctttattacgatttcatagttataaagtcgcacaaaaatatgggattctccataaaaaagctgagggagaagatgcttgaatgtgatggtgcagacaggataaaagaacaggatatggactctgttcgctcaaagctgtataagctcatagacttttgcattttcaagtattatcacgaatttcctgaacttagtgaaaagaatgtggatatactcagagcggctgtatccgatacaaaaaaagataacctttattctgatgaggctgcacgtttatggagcatatttaaagaaaaattcctcggcttctgtgataagatagttgtatgggtaacaggagagcatgagaaagatatcacatccgttattgataaggatgcttacaggaacaggagcaatgtttcatatttctcaaagctgatgtatgcaatgtgctttttccttgacggaaaagagataaatgaccttctcactactcttatcaacaaattcgataatatcgctaaccagataaaaacagccaaagaacttggcattaatactgcttttgtaaagaattacgatttcttcaatcacagcgagaaatatgtcgatgaactgaacatcgtcaagaatattgcaagaatgaagaagccttcaagtaatgccaaaaaagctatgtatcatgatgcgcttactattctcggaatacctgaggatatggatgaaaaagctcttgatgaggaactggatttaattcttgaaaaaaagacagacccagtaactggcaagccactgaaaggtaagaatcctttacgtaattttatcgcaaacaatgtgatagagaattcaagattcatatatcttatcaagttctgcaatcctgagaatgtacgtaaaatcgtgaataatacaaaggtcactgagtttgtgttaaagcgtattcccgatgctcagatcgaacgctattataagtcgtgtacagattctgaaatgaatccgcctactgaaaagaagatcaccgaacttgctggtaagttaaaggatatgaactttggcaacttccgaaatgtgagacagtctgctaaagagaatatggagaaggagcgcttcaaagctgttatagggctttatctcacggtagtatatcgtgttgtcaagaatcttgttgatgtaaactcacgatatatcatggcttttcattcgcttgaacgtgattcacaactgtataacgtatctgttgataatgattatcttgcacttaccgatactcttgttaaggagggagataattccagaagcagatatcttgcaggcaacaagcgtctgagagattgtgtgaagcaggatatcgataatgcaaaaaagtggtttgttagtgataagtacaatagcataaccaagtacaggaataacgttgcccatcttaccgctgtacgtaactgcgctgaattcatcggagatataacgaagatagactcctattttgcattgtatcattatctcattcagagacagcttgcgaaaggtcttgaccatgagcgaagtggctttgacagaaactatccacagtatgcaccgctgtttaagtggcatacgtatgtaaaggatgttgtcaaggctctgaatgctccatttggctacaatatccctcgtttcaagaatctcagcatagatgcactttttgaccgcaacgaaataaagaagaatgacggcgagaaaaaatccgatgat

SEQ ID NO: 127 - DNA, 2835 bp, Artificial Sequence
  Ruminococcus albus nCas1 sequence
atggcaaaaaaatcgaaaggtatgagccttagagaaaaacgtgaacttgaaaagcagaaaaggatacaaaaggcagctgtgaattcagttaatgatacacctgaaaaaacagaagaagcaaatgtcgtatctgtaaatgtcaggacatcggctgagaataagcatagtaaaaaatctgctgccaaagctttgggactgaaatccgggctggttatcggtgatgagctgtaccttacttcattcggcagaggtaacgaagcaaagcttgaaaagaagatatccggtgacactgtcgaaaaacttggcattggtgcttttgaagtcgccgaacgtgacgaatcaacgcttaccctcgaaagtggcaggataaaggacaagaccgccagacccaaagaccccagacatataaccgtcgatacacaaggtaaattcaaggaagatatgcttgggatacgcagtgtactggagaaaaagatatttggcaaaacatttgatgataatatccatgttcagcttgcgtacaatatcctggatgtcgaaaagataatggcacagtatgtcagcgatatcgtatatatgctgcataatactgataaaacagaaagaaacgataatcttatggggtatatgagcatcaggaatacctataagacattttgtgatacgtcaaatcttcccgatgatacaaaacaaaaagttgaaaatcagaagagagagtttgacaagatcataaaaagcggcagacttgggtatttcggcgaagcttttatggtaaacagcggcaatagtaccaagcttagacccgagaaagagatatatcatatctttgcgcttatggcgagcctgaggcagagttactttcacggatatgtaaaagataccgattatcagggaaccacatgggcatatactcttgaggacaagctgaaaggtccgagccatgagttcagggaaaccattgataagatatttgatgagggattcagcaagatcagcaaggactttggcaagatgaacaaggtcaaccttcagatacttgaacagatgattggtgaactgtatggcagtatagaacgacaaaacctcacttgcgattactatgacttcattcaactgaaaaagcataagtatcttggattttctataaagcgtcttagagagaccatgcttgaaacaacaccggctgaatgttataaagctgaatgctataacagcgagcgtcaaaagctgtataagctgatagatttcctgatatatgatctttactataaccgtaagcctgcacgcatcgaagaaatcgtggacaagctgagggaatctgtgaacgacgaagagaaagaatccatatattcagttgaggcgaagtatgtctatgaatcacttagcaaagttctggataaatcgctgaaaaacagtgtgtctggtgaaacgataaaggatctccaaaagagatatgatgacgaaacagcaaacaggatctgggatatctcacagcacagtataagtggaaatgtcaactgtttctgcaagctaatttatattatgaccctgatgcttgacggcaaggagataaatgatctgctgacaacgctggtaaacaagttcgataacatagcatcatttatagatgttatggacgaacttggcttggagcatagttttacagataactataaaatgtttgccgacagcaaggctatatgccttgatctgcagttcataaacagttttgcacgtatgtcaaagatcgatgatgagaagtcaaaaagacagcttttccgtgatgcgcttgtcatactggatatcggtaataaagatgagacttggataaataattatctggattctgatattttcaaactggacaaagaaggtaacaagttaaagggcgcaaggcatgatttcaggaactttatagccaataatgttataaagtcatcacgtttcaaatacctagtaaaatacagcagtgccgatggtatgataaagctgaaaacgaatgaaaagctgataggctttgttctggataagcttccagaaacgcagatagaccgctactatgaatcatgcggacttgacaatgcggtagtagataagaaagtcaggatagaaaagctatcggggcttatcagagatatgaagttcgatgatttcagcggtgtcaaaacctcaaacaaagcaggagataatgacaaacaggataaggcgaaatatcaggcgataataagcctgtacctcatggtgctgtatcagatagtcaagaacatgatatatgtcaactcacgttatgttatcgctttccattgtcttgaacgtgactttggtatgtatggaaaagattttggaaagtattatcaaggctgccgaaaacttacagatcattttattgaagaaaagtacatgaaagagggtaaacttggctgcaataaaaaagtcggcagatatctgaaaaataatatttcctgctgcactgatggactgataaatacctaccgtaatcaggttgatcactttgcagtggtaaggaagataggcaactatgcggcatatatcaagagtatcggttcgtggtttgaactttatcactatgtaatacagaggatagtttttgacgaatacagatttgcacttaacaacactgaaagcaactataagaacagcatcatcaagcaccatacctactgtaaggatatggtcaaggcactgaacacacctttcggttatgacctgccgagatacaagaatctttctatcggtgatctgtttgatcgcaataattatctgaataaaacaaaagagtcaatagatgcaaatagctctattgacagtcagtga

SEQ ID NO: 128 - DNA, 2904 bp, Artificial Sequence
  Ruminococcus flavefaciens XPD nCas1 sequence
atgatcgaaaagaagaagtcatttgcaaagggcatgggagtaaaatcaacacttgtatccggttcaaaggtatacatgacgacgttcgcagaaggaagcgatgccagacttgaaaagatcgttgaaggcgattctatcagatctgtcaacgaaggagaagcgttctcagctgaaatggctgataagaatgcaggctacaagatcggtaacgcaaagttcagccacccaaagggctatgctgtagttgcaaacaaccccttatacaccggaccggtacagcaggatatgctcggtctgaaggaaacgcttgaaaagagatattttggagagtctgccgacggaaatgataatatctgtattcaggtcatccataatatcctcgatatcgaaaagatcctcgctgaatatataaccaatgctgcttatgcggtaaacaatatttccggtcttgataaggatatcatcggttttggtaagttcagtacggtctatacttatgatgagttcaaggatcctgaacatcacagagcagctttcaacaataacgataagttaattaatgccatcaaggcacagtatgatgaatttgacaatttccttgataatcctcgtctcggctactttggacaggcttttttcagtaaggaaggcagaaattacattatcaattacggcaacgagtgttatgatattcttgctttactcagcggattgcgtcactgggtagtacataataatgaggaagaatcaaggatttcccgtacatggctttataatctcgacaagaatcttgacaacgaatatatctctactctcaattatctgtatgatagaattacaaacgaattaacaaattccttctcaaagaatagtgcagccaacgtaaactatatcgctgaaacccttggtattaatcctgctgaatttgcagagcagtatttcagattcagtatcatgaaggaacagaagaatctcggtttcaatattactaagctgagagaagtaatgcttgacagaaaggatatgtctgagatccgtaaaaatcataaggtctttgattcaatccgtactaaggtctatactatgatggatttcgttatctacagatattacattgaagaggatgcaaaggttgctgctgccaacaagtctctgccggataacgaaaaaagcctcagtgaaaaggatatctttgttataaatctcagaggaagctttaacgatgatcagaaggatgccctttattatgatgaggccaatcgtatttggagaaagctcgaaaacattatgcacaatatcaaggaattcagaggcaataagacacgtgaatacaagaagaaggatgctccaagactccccagaattcttcctgccggaagggatgtttccgcgttctcaaagttgatgtacgctcttaccatgttccttgatggtaaggagatcaatgatcttctcaccacgctcatcaataagttcgataacatccagagtttcctcaaggtaatgcctcttatcggagtgaatgcaaagtttgttgaggaatatgccttcttcaaggacagcgcaaagattgctgacgaactcaggctgattaagagctttgccagaatgggagaacctatcgcagatgcaagacgtgctatgtatatcgatgctatcaggattctcggaacaaacctcagctatgatgagcttaaggcccttgccgatactttttcgcttgatgaaaacggcaacaagcttaagaagggcaagcacggcatgagaaacttcatcattaataatgtaatcagtaacaagcgcttccattatctcattcgttacggtgatcctgcacatctccatgagatcgccaagaatgaagctgttgtaaagttcgtcctcggcaggatagctgatatccagaagaagcagggacagaacggaaagaatcagatcgacaggtactatgagacctgtatcggcaaggacaagggcaagtctgtctccgaaaaggttgatgccctcacaaagattatcaccggtatgaactacgatcagttcgataagaagagaagcgttattgaggatactggaagagaaaacgctgagagagaaaagttcaagaagatcatcagcctctatcttactgtcatttatcacatccttaagaatattgttaatatcaatgcgcgttacgttatcggcttccattgcgttgagcgtgatgcacagctctataaggaaaagggctatgatatcaacctcaagaagctcgaagaaaaggggttttcatcagtcacaaagctgtgtgcaggtattgatgagactgctcctgacaagcgtaaggatgttgaaaaggaaatggctgagcgtgcaaaggaatctatcgatagccttgaatctgcaaatcctaagctttacgcaaactatatcaagtattctgacgagaagaaggctgaggaatttactagacagatcaaccgtgagaaggcaaagaccgctctgaatgcatatctcagaaatactaagtggaatgtgataatcagggaagatcttcttagaatcgataataagacatgtacgctctttagaaataaggccgttcatcttgaagttgcaagatatgttcatgcatatatcaacgatattgccgaagtaaacagctatttccagctttatcattacatcatgcagagaatcatcatgaacgaaagatatgaaaagtcttctggaaaggtaagcgaatacttcgatgctgtgaacgatgaaaagaagtacaacgacaggcttctgaagctgttgtgcgttccatttggttactgcatcccgagattcaagaatctctccattgaagctttgttcgacaggaacgaagcagctaagtttgacaaggaaaagaagaaagtatcaggtaattcatag

SEQ ID NO: 129 - DNA, 36 bp, Artificial Sequence
  Consensus DR
gaactacacccgtgcaaaaatgcaggggtctaaaac

SEQ ID NO: 130 - DNA, 36 bp, Artificial Sequence
  Consensus DR
ctactacactggtgcaaatttgcactagtctaaaac

SEQ ID NO: 131 - RNA, 36 nt, Artificial Sequence
  Consensus DR
caaguaaaccccuaccaacuggucgggguuugaaac

SEQ ID NO: 132 - RNA, 36 nt, Artificial Sequence
  Consensus DR
cuacuacacuggugcgaauuugcacuagucuaaaac

SEQ ID NO: 133 - RNA, 36 nt, Artificial Sequence
  Consensus DR
gaacuauaguagugugaauuuacacuacucuaaaac

SEQ ID NO: 134 - RNA, 36 nt, Artificial Sequence
  Consensus DR
cuacuauacuagugugauuuuacacuagucuaaaac

SEQ ID NO: 135 - RNA, 36 nt, Artificial Sequence
  Consensus DR
gaccaacaccucugcaaaacugcaggggucuaaaac

SEQ ID NO: 136 - RNA, 36 nt, Artificial Sequence
  Consensus DR
gcacuacaccccccugaaacaugaggggucuaaaac

SEQ ID NO: 137 - DNA, 36 bp, Artificial Sequence
  Consensus DR
gcactacacccccctgaaacatgaggggtctaaaac

SEQ ID NO: 138 - protein, 966 aa, Artificial Sequence
  50% consensus sequence for 7 full-length nCas1 orthologues
  SITE (2)..(4): Xaa can be any naturally occurring amino acid
  SITE (13)..(13): Xaa can be any naturally occurring amino acid
  SITE (22)..(23): Xaa can be any naturally occurring amino acid
  SITE (25)..(25): Xaa can be any naturally occurring amino acid
  SITE (32)..(33): Xaa can be any naturally occurring amino acid
  SITE (39)..(40): Xaa can be any naturally occurring amino acid
  SITE (43)..(44): Xaa can be any naturally occurring amino acid
  SITE (46)..(56): Xaa can be any naturally occurring amino acid
  SITE (60)..(60): Xaa can be any naturally occurring amino acid
  SITE (69)..(70): Xaa can be any naturally occurring amino acid
  SITE (72)..(72): Xaa can be any naturally occurring amino acid
  SITE (74)..(76): Xaa can be any naturally occurring amino acid
  SITE (83)..(83): Xaa can be any naturally occurring amino acid
  SITE (86)..(86): Xaa can be any naturally occurring amino acid
  SITE (88)..(88): Xaa can be any naturally occurring amino acid
  SITE (94)..(95): Xaa can be any naturally occurring amino acid
  SITE (97)..(108): Xaa can be any naturally occurring amino acid
  SITE (110)..(135): Xaa can be any naturally occurring amino acid
  SITE (139)..(147): Xaa can be any naturally occurring amino acid
  SITE (149)..(150): Xaa can be any naturally occurring amino acid
  SITE (157)..(158): Xaa can be any naturally occurring amino acid
  SITE (162)..(162): Xaa can be any naturally occurring amino acid
  SITE (167)..(167): Xaa can be any naturally occurring amino acid
  SITE (191)..(192): Xaa can be any naturally occurring amino acid
  SITE (201)..(209): Xaa can be any naturally occurring amino acid
  SITE (211)..(211): Xaa can be any naturally occurring amino acid
  SITE (213)..(214): Xaa can be any naturally occurring amino acid
  SITE (216)..(217): Xaa can be any naturally occurring amino acid
  SITE (220)..(221): Xaa can be any naturally occurring amino acid
  SITE (225)..(225): Xaa can be any naturally occurring amino acid
  SITE (227)..(228): Xaa can be any naturally occurring amino acid
  SITE (230)..(242): Xaa can be any naturally occurring amino acid
  SITE (244)..(249): Xaa can be any naturally occurring amino acid
  SITE (251)..(251): Xaa can be any naturally occurring amino acid
  SITE (253)..(257): Xaa can be any naturally occurring amino acid
  SITE (264)..(264): Xaa can be any naturally occurring amino acid
  SITE (267)..(270): Xaa can be any naturally occurring amino acid
  SITE (273)..(280): Xaa can be any naturally occurring amino acid
  SITE (283)..(283): Xaa can be any naturally occurring amino acid
  SITE (285)..(285): Xaa can be any naturally occurring amino acid
  SITE (290)..(292): Xaa can be any naturally occurring amino acid
  SITE (296)..(298): Xaa can be any naturally occurring amino acid
  SITE (300)..(310): Xaa can be any naturally occurring amino acid
  SITE (314)..(314): Xaa can be any naturally occurring amino acid
  SITE (316)..(318): Xaa can be any naturally occurring amino acid
  SITE (320)..(321): Xaa can be any naturally occurring amino acid
  SITE (323)..(325): Xaa can be any naturally occurring amino acid
  SITE (329)..(331): Xaa can be any naturally occurring amino acid
  SITE (333)..(337): Xaa can be any naturally occurring amino acid
  SITE (340)..(341): Xaa can be any naturally occurring amino acid
  SITE (343)..(345): Xaa can be any naturally occurring amino acid
  SITE (350)..(352): Xaa can be any naturally occurring amino acid
  SITE (354)..(357): Xaa can be any naturally occurring amino acid
  SITE (359)..(368): Xaa can be any naturally occurring amino acid
  SITE (373)..(375): Xaa can be any naturally occurring amino acid
  SITE (377)..(378): Xaa can be any naturally occurring amino acid
  SITE (391)..(391): Xaa can be any naturally occurring amino acid
  SITE (394)..(397): Xaa can be any naturally occurring amino acid
  SITE (399)..(404): Xaa can be any naturally occurring amino acid
  SITE (411)..(411): Xaa can be any naturally occurring amino acid
  SITE (415)..(415): Xaa can be any naturally occurring amino acid
  SITE (417)..(417): Xaa can be any naturally occurring amino acid
  SITE (420)..(420): Xaa can be any naturally occurring amino acid
  SITE (423)..(424): Xaa can be any naturally occurring amino acid
  SITE (426)..(427): Xaa can be any naturally occurring amino acid
  SITE (429)..(433): Xaa can be any naturally occurring amino acid
  SITE (435)..(436): Xaa can be any naturally occurring amino acid
  SITE (438)..(439): Xaa can be any naturally occurring amino acid
  SITE (442)..(442): Xaa can be any naturally occurring amino acid
  SITE (444)..(445): Xaa can be any naturally occurring amino acid
  SITE (447)..(447): Xaa can be any naturally occurring amino acid
  SITE (450)..(452): Xaa can be any naturally occurring amino acid
  SITE (454)..(455): Xaa can be any naturally occurring amino acid
  SITE (458)..(459): Xaa can be any naturally occurring amino acid
  SITE (462)..(477): Xaa can be any naturally occurring amino acid
  SITE (479)..(481): Xaa can be any naturally occurring amino acid
  SITE (483)..(485): Xaa can be any naturally occurring amino acid
  SITE (487)..(487): Xaa can be any naturally occurring amino acid
  SITE (489)..(489): Xaa can be any naturally occurring amino acid
  SITE (491)..(506): Xaa can be any naturally occurring amino acid
  SITE (509)..(510): Xaa can be any naturally occurring amino acid
  SITE (517)..(517): Xaa can be any naturally occurring amino acid
  SITE (520)..(520): Xaa can be any naturally occurring amino acid
  SITE (542)..(542): Xaa can be any naturally occurring amino acid
  SITE (546)..(546): Xaa can be any naturally occurring amino acid
  SITE (549)..(549): Xaa can be any naturally occurring amino acid
  SITE (554)..(556): Xaa can be any naturally occurring amino acid
  SITE (558)..(560): Xaa can be any naturally occurring amino acid
  SITE (562)..(563): Xaa can be any naturally occurring amino acid
  SITE (565)..(566): Xaa can be any naturally occurring amino acid
  SITE (568)..(569): Xaa can be any naturally occurring amino acid
  SITE (571)..(572): Xaa can be any naturally occurring amino acid
  SITE (575)..(577): Xaa can be any naturally occurring amino acid
  SITE (580)..(580): Xaa can be any naturally occurring amino acid
  SITE (584)..(584): Xaa can be any naturally occurring amino acid
  SITE (587)..(589): Xaa can be any naturally occurring amino acid
  SITE (593)..(593): Xaa can be any naturally occurring amino acid
  SITE (600)..(600): Xaa can be any naturally occurring amino acid
  SITE (605)..(612): Xaa can be any naturally occurring amino acid
  SITE (614)..(616): Xaa can be any naturally occurring amino acid
  SITE (618)..(624): Xaa can be any naturally occurring amino acid
  SITE (626)..(629): Xaa can be any naturally occurring amino acid
  SITE (631)..(632): Xaa can be any naturally occurring amino acid
  SITE (634)..(636): Xaa can be any naturally occurring amino acid
  SITE (648)..(648): Xaa can be any naturally occurring amino acid
  SITE (650)..(650): Xaa can be any naturally occurring amino acid
  SITE (653)..(653): Xaa can be any naturally occurring amino acid
  SITE (656)..(656): Xaa can be any naturally occurring amino acid
  SITE (659)..(659): Xaa can be any naturally occurring amino acid
  SITE (662)..(664): Xaa can be any naturally occurring amino acid
  SITE (666)..(667): Xaa can be any naturally occurring amino acid
  SITE (669)..(669): Xaa can be any naturally occurring amino acid
  SITE (673)..(675): Xaa can be any naturally occurring amino acid
  SITE (679)..(680): Xaa can be any naturally occurring amino acid
  SITE (684)..(684): Xaa can be any naturally occurring amino acid
  SITE (694)..(696): Xaa can be any naturally occurring amino acid
  SITE (698)..(706): Xaa can be any naturally occurring amino acid
  SITE (708)..(709): Xaa can be any naturally occurring amino acid
  SITE (711)..(713): Xaa can be any naturally occurring amino acid
  SITE (715)..(718): Xaa can be any naturally occurring amino acid
  SITE (720)..(720): Xaa can be any naturally occurring amino acid
  SITE (723)..(723): Xaa can be any naturally occurring amino acid
  SITE (726)..(726): Xaa can be any naturally occurring amino acid
  SITE (728)..(733): Xaa can be any naturally occurring amino acid
  SITE (735)..(738): Xaa can be any naturally occurring amino acid
  SITE (742)..(742): Xaa can be any naturally occurring amino acid
  SITE (745)..(745): Xaa can be any naturally occurring amino acid
  SITE (753)..(753): Xaa can be any naturally occurring amino acid
  SITE (755)..(756): Xaa can be any naturally occurring amino acid
  SITE (778)..(779): Xaa can be any naturally occurring amino acid
  SITE (782)..(797): Xaa can be any naturally occurring amino acid
  SITE (800)..(812): Xaa can be any naturally occurring amino acid
  SITE (816)..(852): Xaa can be any naturally occurring amino acid
  SITE (856)..(856): Xaa can be any naturally occurring amino acid
  SITE (858)..(858): Xaa can be any naturally occurring amino acid
  SITE (861)..(861): Xaa can be any naturally occurring amino acid
  SITE (863)..(863): Xaa can be any naturally occurring amino acid
  SITE (865)..(868): Xaa can be any naturally occurring amino acid
  SITE (871)..(871): Xaa can be any naturally occurring amino acid
  SITE (874)..(875): Xaa can be any naturally occurring amino acid
  SITE (877)..(877): Xaa can be any naturally occurring amino acid
  SITE (886)..(887): Xaa can be any naturally occurring amino acid
  SITE (890)..(890): Xaa can be any naturally occurring amino acid
  SITE (892)..(897): Xaa can be any naturally occurring amino acid
  SITE (899)..(912): Xaa can be any naturally occurring amino acid
  SITE (914)..(914): Xaa can be any naturally occurring amino acid
  SITE (917)..(917): Xaa can be any naturally occurring amino acid
  SITE (920)..(920): Xaa can be any naturally occurring amino acid
  SITE (926)..(926): Xaa can be any naturally occurring amino acid
  SITE (932)..(932): Xaa can be any naturally occurring amino acid
  SITE (941)..(942): Xaa can be any naturally occurring amino acid
  SITE (949)..(954): Xaa can be any naturally occurring amino acid
  SITE (956)..(957): Xaa can be any naturally occurring amino acid
  SITE (959)..(963): Xaa can be any naturally occurring amino acid
MXXXKKKMSLREXREAEKQARXXKXAAASKNXXAVPAKXXAAXXPXXXXXXXXXXXKKSXAKAAGLKSXXVXGXXXYMTSFGXGNXAXLEKKIXXBXXXXXXXXXXXXEXXXXXXXXXXXXXXXXXXXXXXXXXXNPLXXXXXXXXXVXXDMLGLKXXLEKXYFGKXFDDNIHIQLIYNILDIEKILAVYXXNIVYALNNXXXXXXXXXNXDXXGXXSTXXTYDXFXXPXXXXXXXXXXXXXIXXXXXXFXKXXXXXRLGYFGXAFXXXXKBXXXXXXXXKEXYXILALXXXLRQXXXHXXXXXXXXXXXWLYXLXXXLXXEXXXTLDXXXDXXXXXINXXFXXXNKVNXXXLXXXXGXXXXXXXXXXYYDFXXXKXXKNLGFSIKKLREXMLXXXXAXXXXXXZYDSVRXKLYXLXDFXIYXXYXXEXXXXXEXXVXXLRXSXXDXEKXXXYXXEAXXLWXXXXXXXXXXXXXXXXGXXXKXXXKXBXDXXXXXXXXXXXXXXXXBVXXFSKLIYXLTXFLDGKEINDLLTTLINKFDNIXSFLXVMXELGLXXXFXXXYXXFXXSXXIXXELXXXKNXARMXKPXXXAKRXMYRDALXILGIXXXXXXXXIXXXLXXXXXXXDXXXXKXXKXXXGLRNFIANNVIXSXRFXYLXRYXNPXXXRXXAXNEKXXXFVLXXIPDXQIERYYESCXXXBXXXXXXXXXIXXLXXXIXXXXFXBFXBVXQXXXXXXNXXXXKEKXKAXIGLYLTVXYXXVKNLVNVNARYVIAFHCLERDXXLYXXXXXXXXXXXXXXXXLTXXXXXXXXXXXXXYLKXXXXXXXXXXXXXXXXXXXXXXXXXXXXXXXXXXXXXYRNXVXHLXAXRXXXXYIXDIXXVXSYFALYHYXXQRXLXXXXXXKXXXXXXXXXXXXXXHXTYXKDXVKALNXPFGYNXPRYKNLSIXXLFDRNEXXXXXXEXXKXXXXXDSQ

SEQ ID NO: 139 - DNA, 2718 bp, Artificial Sequence
  Gut metagenome P1E0 nCas1 sequence
atggaacgtgaggtcaaaaagccccccaaaaaatccttggcaaaggcggcgggactgaagtccaccttcgtcatttcgccgcaggagaaggagctggccatgaccgccttcgggcggggcaacgacgcgctgctgcaaaagcgcatcgtggacggcgtggtgcgggatgtggccggagagaagcagcagtttcaggtgcagcggcaggacgagagccgtttccgactgcaaaacagccgccttgccgaccgcacggtaacggcggacgacccgctgcaccgcgcggagacgccccgccgccagccgctgggcgcaggtatggatcagctgcgccgcaaggcaatactggagcagaaatacttcggcaggacgtttgacgacaacatccacatccaactgatctacaacatattggacatccacaagatgctggctgtccccgccaaccacatcgtccacacgctgaatctgctgggcggatacggcgagacggactttgtggggatgctgcccgccgggctgccgtatgacaagctgagggtcgtgaaaaaaaagaacggcgacaccgtggacatcaaggcggatatcgccgcctatgccaagcggccgcagctggcctatctgggtgcggcgttctatgacgtgacccccggcaagagcaaaagggacgcggcgcggggcagagtcaagcgcgagcaggacgtgtatgccattctctcgctgatgagccttctgcggcagttctgcgcccacgacagtgtgcggatatggggacagaacaccaccgccgccctgtatcatttgcaggcgctgccgcaggacatgaaggatctgctggatgacggctggcgcagggcgctgggcggcgtcaacgaccatttcctcgacaccaacaaggtgaacctgctgaccctgttcgagtactacggcgccgagacgaagcaggcgcgggtggcgctgacgcaggacttctaccgcttcgtggtgctgaaggagcagaagaacatgggcttctccctgaggcgtctgcgggaggagctgctgaagctgccggacgccgcctacctcaccggtcaggagtacgactcggtgcggcagaagctgtatatgctgctggacttcctgctgtgccgcctctacgcgcaggagcgggccgaccgctgcgaggagctggtgtccgcgctgcgctgcgccttgtcggatgaggaaaaggacaccgtctatcaggcggaggccgccgcgctgtggcaggcgctgggcgacacgctgcgccggaagctgctgccgctgctgaaaggcaaaaagctgcaagacaaggacaagaagaagtcggatgagctggggctgtcccgtgacgtgctggatggtgtgctgttccgccccgcacagcagggcagccgcgccaacgccgactatttctgccggctgatgcacctgtccacatggttcatggacggcaaggagatcaacaccctgctgaccaccctcatcagcaagcttgagaatatcgacagcctgcggagcgtgctggagagcatgggactggcgtacagctttgtaccggcctacgccatgtttgaccacagccgctatatcgccggtcagctgcgggtggtcaacaacatcgcgcggatgcgtaagcctgccatcggcgccaagcgggagatgtaccgcgccgccgtggtgctgctgggcgtggacagcccggaggcagccgcggccatcaccgacgacctgctgcagatcgacccggaaacggggaaggtgcgcccccgcagcgacagcgcacgggacacgggtctgcggaacttcatcgccaacaacgtggtggaatcccgccgcttcacctacctgctgcgctacatgacgccggagcaggcgcgcgtgctggcgcagaacgaaaagctcatcgccttcgtgctgtccaccgtgcccgacacccagctggagcgctactgccgcacctgcgggcgggaggacatcaccggccgtccggcgcagatacgttacctgacggcgcagatcatgggcgtccggtatgagagcttcaccgatgtggagcagcgcgggagaggggataaccccaaaaaggagcggtacaaggctctcatcggcctgtacctgacggtgctgtatctggcggtgaagaatatggtcaactgcaacgcccgctacgtcatcgccttctactgccgtgaccgtgacacagcgctctatcagaaggaggtctgctggtacgatctggaggaggacaagaaaagcggcaagcagcggcaggtggaggactacaccgccctgacccgctattttgtgtcgcagggctatctgaaccgccatgcctgcggctatctgcgaagcaatatgaacggcatcagcaacagcctgctgaccgcctaccgcaacgcggtggatcacctgaacgcgatcccgccgctgggcagcctgtgccgggacatcggccgggtggacagctactttgccctgtaccactacgccgtgcagcagtatctgaacggcagatattacagaaagacgccccgcgagcaggagctgtttgccgccatggcgcagcataggacatggtgcagcgatctggtgaaggcactgaacaccccctttggctacaacctcgcccgctacaagaacctgtccattgacggtctgtttgaccgcgagggcgaccatgtggtgcgggaggacggcgaaaaaccggcggag

SEQ ID NO: 140 - DNA, 2835 bp, Artificial Sequence
  Anaerobic digester nCas1 sequence
aataacaaaagaaaaaccaaagctaaggcagctggactcaaatccgtttttttcgaccaaaagcaagctgttttgacgacttttgcaaaaggcaataattctcaaatcgaaaagaaggtcgtaaatagcgaggttaaggatttgcgacaaccacctgcttttgatctcgaacttaaagagaagactttttatatcagcggtaaaaacaacatcaatacctcaagagaaaacccattggcttccgcgtcgcttcctctaagcaagcgacaacgaattagagcagaaagaattaaacgggcgagagaggagaatcgcccctaccataacgtaaagagagtcggcgaagatgacttacgggcgaaagccgatttagagaagcactatttcggaaaagaatactctgacaatttaaaaattcaaataatctacaacattctcgatataaataagattatttccccctatattaatgatattgtttattctatgaataatcttgctcgtaacgacgagtatattgatggcaagattgatgttatcggcagtttaagctcgacgaccgattactcttcatttatgagtccaaataaggatttagaaaaagaaaaaaaattctcttttcatcgcgaaaactacaaaaaatttgtcgaagcctctaagccatatatgcgatattatggaaaagtttttattcgcgatgtcaaaaagagcaaactcagcaccggcaagggcgagaaaatcgaagtcatgtatcgctctgacgaggaaattttcacaatcttccaaatattaagttatgttcgtcaaagcatcatgcataatgatataggcaataagtcatcgattttagcaatcgaaaaatatcctgcccgctttgttgggttcttatcggacttgcttaaaacaaaaacaaatgatgtcaatagaatgttcatcgataataatagccagactaatttctgggtacttttttctatctttggtcttcaagatcatacgagcggcgcggacaaaatttgtcgtaatttttatgatttcgtcattaaagccgatagcaaaaacttaggtttttcacttaaaaaaatacgggaattaatgctcgatttgccaaatgccaatatgcttagagatcatcaatttgacactgttcgcagcaagttttacacactgcttgatttcatcatttaccagcactatttagaagaaaagtcgcgaatagacaatatggttgagaagttaagaatgactttaaaagaggaagaaaaggaagtgctttatgctgccgaggcaaaaatagtctggaacgccatcggggcgaaagtcataaacaagcttgttccgatgatgaatggcgacgcgctaaaagagattaaaaggaaaaacagagaccgcaaattgcctcaaagcgttatcgcaacggtccaagttaattcagacgctaacgtatttagtggcctgatatacttccttaccctctttttagacggcaaagaaattaatgaaatggtcagcaaccttattaccaaattcgaaaacattgatagtttactccatgttgatcgcgaaatttataaaagcgatgaaaaggatctcgatttagaaattgaaaaactcgcccttttctttaaaggtgtcgtgcgaccgaacgctaaaacggataccggcgccggagaaatatctaaatcattttcgatatttcaatccgccgaaagaattatcgaggagctgaagtttatcaaaaatgtgacgcggatggataatgaaattttcccatcagaaggagtgtttttagatgcggcaaatgtcttgggagttagaggcgacgacttcgatttttcaaacgaatttgtcggtgatgatttgcattctgacgccaataaaaaaattatcaataagatcaacggcaccaaagaagatcgcaatttgcgcaacttcataataaataatgttgtcaagtcgcggcgctttcaatatatcgcccgccacatgaacacacactatgttaaacaactcgccaacaacgaaactctcaaccgctttgtcttaaataaaatgggtgatgctaaaatcattaaccgctactacgaaagcatcagtggaaacactccaaatatcgaggttagaagccagatcgattatttggttaaacgtcttcggagtttcagttttgaagatctcaacgacgtaaaacaaaaagtgaggcccggcacaaatgaaagcatagaaaaggaaaagaaaaaagcgctagtgggtctttgcttaaccattcaatacttggtatataagaatctcgtcaatataaacgctcgttatacgactgctttctattgtcttgaacgggacagcaaacttaaaggctttggagttgatgtttggcgagattttgaaagctatacagccctgacaaatcactttattaaagagggctatcttcctgtccgcaaggcagaaattttacgagcgaatttaaaacatcttgattgcgaagatggatttaaatattatcgcaaccaagtcacacaccttaacgccatccgcgtagcatacaaatatattaacgaaattaaaagtgttcactcatatttcgcgctctatcattatattatgcaacgccacctatatgattctttgcaggcaaaggcaaaagattctagtggttttgttattgacgccttaaaaaagagttttgagcacaagatttactcgaaggatcttttgcacgttcttcattcgcccttcggttacaatacggcccgatacaaaaacttaagtatcgaggcattatttgacaaaaacgaaagccggcccgaggtgaatcctttatcgaccaacgat

SEQ ID NO: 141 - DNA, 2769 bp, Artificial Sequence
  Ruminococcus sp. CAG:57 nCas1 sequence
atggcaaaaaagaataaaatgaagcctagagagctgcgtgaggctcagaaaaaagccagacagctcaaagcggctgagataaataataacgctgctcctgcgatcgctgccatgcctgctgcagaggtcattgcacctgtggcagagaagaaaaaatcctccgtaaaggcggcaggaatgaagtctattcttgtcagcgaaaataaaatgtacataacctctttcggcaagggcaattctgctgtgcttgaatatgaggtggacaataatgactacaacaaaactcagctttcttcaaaggacaacagcaatatcgagcttggtgatgtaaacgaggtaaacatcactttttcaagcaagcatggctttgggagcggagtggagataaatacttcaaaccctactcacagaagcggtgaaagctcgcctgtaagaggggatatgctggggcttaaatcggagcttgaaaagcgctttttcggcaaaacttttgatgataatatacatatccagcttatttacaacattctggatatcgaaaagatacttgcggtgtatgtaacgaatatcgtttatgcgctgaacaatatgcttggtataaaggattctgaaagttatgatgattttatggggtatctttctgcaagaaatacttatgaagtttttactcaccctgacaaaagcaatctttccgataaggtaaagggtaatatcaagaaaagccttagcaagtttaatgacttgctgaaaactaagcgccttggctatttcggccttgaagagccaaagacaaaagacacaagagcttcggaagcatacaaaaagcgtgtttatcatatgcttgcaattgtggggcagataagacagtgtgtttttcatgataaatcgggtgcaaaaagatttgacctttacagttttattaacaatattgatcccgaatacagagatactcttgactatcttgttgaggagcgtttaaagtccataaacaaggactttatcgagggtaacaaggtcaatatcagcctgcttattgatatgatgaaaggctatgaggctgatgatatcatacgcctttattacgatttcattgtgcttaaatctcagaaaaatctcggcttttctatcaaaaagcttcgtgagaaaatgctggaggaatacggtttcagatttaaggacaagcaatatgactctgtgcgctcaaagatgtacaagcttatggatttcctgcttttctgcaactactacagaaatgacgttgccgcaggcgaagctcttgtgcgtaaactgcgtttttcaatgaccgatgatgaaaaagaggggatatatgctgatgaagcggcaaagctttggggcaaattcaggaatgattttgaaaatatcgccgaccacatgaacggtgacgttatcaaggagcttggcaaggctgacatggattttgatgagaaaattcttgacagtgaaaagaagaatgcgtctgaccttttgtatttctccaaaatgatatatatgctcacatattttcttgacggcaaggagataaacgatcttcttacaacgcttatcagcaagtttgataacatcaaggagtttttgaagataatgaaaagctctgctgttgatgttgagtgtgagcttacggcgggctacaagctgttcaatgacagccagaggataaccaacgagctttttatcgtaaagaacattgcttccatgagaaagcctgcggcttcagcgaagcttacgatgttccgtgacgcactgactatactcggtatagacgacaatatcacggacgataggataagcgagattctaaaacttaaagaaaaaggcaagggcatacatggtctgagaaattttataacaaacaatgttatcgagtcctctcggtttgtataccttatcaagtatgcgaacgctcagaagataagagaagtggctaaggatgagaaagttgtcatgtttgttcttgggggtatccctgacacgcagatagagcgttattacaagagttgtgtggagtttcctgacatgaatagttctttggaagcaaagcgcagtgagcttgcgagaatgataaagaacatcagctttgatgatttcaaaaatgtgaaacagcaggcaaagggcagagaaaacgtggctaaggagagggcaaaggctgttatcgggctttatcttacggtcatgtatctgctggtgaaaaatcttgtgaatgtcaatgcaaggtatgttattgcgatacactgccttgaacgtgattttgggctgtataaggagataattcctgagttggcttcaaagaacttgaaaaatgactacaggatactttcacagacgctttgtgaactttgtgatgatcgtaatgagtcgtcgaatttgttcttgaaaaagaacaagcggctgcgcaagtgcgttgaagttgatatcaataatgcagacagcagcatgacaagaaaataccgcaactgtattgctcatcttactgtagttcgtgaactgaaagaatacataggagatattcgtacagtggattcttacttctccatttatcattatgttatgcagcgttgtatcacgaaaaggggagatgacacaaagcaagaagagaaaataaagtatgaggacgatcttttaaaaaatcacggctatacgaaagactttgtaaaggctctcaactcgccgtttggatacaacattccgaggtttaaaaatctttcaattgagcagttgtttgacagaaatgaatatcttactgaaaagtag

SEQ ID NO: 142 - DNA, 2715 bp, Artificial Sequence
  Human codon-optimized Gut metagenome P1E0 nCas1
gaaagggaggtgaagaagcctcccaagaaatccctggccaaagccgccggactgaagtccacattcgtcatcagcccccaggaaaaggaactcgctatgaccgcctttggcagaggcaacgatgccctgctgcaaaagagaatcgtggacggcgtggtccgtgatgttgccggagagaaacagcagttccaggtccagaggcaagacgagagcagattcagactccaaaactccagactggccgataggaccgtcaccgctgacgaccccctccacagggctgaaacacccaggagacagcctctgggcgctggcatggatcagctgaggagaaaagccattctggagcaaaagtactttggcaggacattcgacgacaacatccacatccagctgatctacaacatcctggacatccacaagatgctggctgtgcctgctaaccatatcgtgcacaccctgaacctcctgggaggctacggcgaaactgattttgtgggaatgctgcctgccggactcccctacgataagctcagggtcgtgaagaaaaaaaatggcgataccgtcgacatcaaggccgacattgctgcctatgccaaaagaccccagctggcttacctgggagctgccttctatgacgtgacccctggaaaaagcaagcgtgatgctgccaggggcagggtgaagagggaacaggacgtctatgccattctgtccctcatgtccctgctgagacaattctgcgcccacgatagcgtcaggatctggggccagaataccaccgccgccctgtaccacctccaggccctgccccaggatatgaaggacctgctggacgacggctggaggagagctctgggaggcgtgaatgaccatttcctcgacaccaacaaggtgaacctcctcaccctcttcgagtactatggcgccgaaaccaagcaggctagggtggccctgacacaggacttttacaggttcgtggtgctgaaggagcagaagaacatgggctttagcctcaggaggctgagggaagagctgctgaagctgcccgacgccgcttacctgaccggacaggagtacgactccgtgaggcagaaactgtacatgctcctggacttcctgctgtgcaggctgtacgcccaggagagagccgatagatgcgaagagctggtgagcgccctcagatgtgctctgagcgacgaggagaaggatacagtctaccaagctgaagccgctgccctgtggcaagccctgggcgacacactcaggaggaaactcctccccctcctgaagggcaagaaactgcaagacaaggataagaaaaagtccgacgaactcggcctgtccagggatgtgctcgatggcgtgctctttagacctgcccagcagggcagcagagccaacgccgactacttttgtaggctcatgcacctgagcacctggtttatggacggcaaggagatcaataccctgctgaccaccctgatctccaagctggagaatatcgatagcctgaggtccgtcctggagtccatgggcctggcctatagctttgtccctgcctacgccatgtttgaccacagcagatacatcgctggccagctgagggtggtgaacaacatcgccagaatgaggaaacccgccattggagccaaaagagagatgtacagggccgctgtcgtgctgctcggagtggacagccccgaagctgctgccgccattacagacgatctgctgcagatcgatcccgaaactggaaaggttcgtcctagatccgactccgctagagacaccggactgaggaacttcatcgctaacaacgtcgtggagagcaggaggttcacctacctcctgagatacatgacccctgaacaggccagggtcctggctcaaaacgagaagctgattgccttcgtgctcagcacagtgcccgacacccagctggagaggtattgtaggacctgtggaagggaggacatcacaggcaggcccgcccagattaggtatctgaccgctcagatcatgggcgtgaggtacgaaagctttaccgacgtggaacagaggggaaggggcgataatcctaaaaaggagagatacaaggccctgatcggcctctacctgacagtgctgtatctggccgtcaaaaatatggtgaattgtaacgccaggtacgtgatcgccttctactgcagggatagggacaccgccctctaccagaaggaagtgtgttggtatgacctggaggaggacaagaagtccggaaagcaaagacaggtcgaggactatacagccctgaccagatatttcgtgtcccagggctacctgaacagacacgcctgcggctatctcaggtccaacatgaacggcatcagcaacagcctgctgaccgcctacagaaatgccgtggaccacctgaacgccattcctcctctgggctccctgtgtagggacatcggcagagtggattcctacttcgctctgtaccactacgccgtgcaacagtacctcaatggaaggtattacagaaaaacacccagagaacaggaactcttcgccgccatggctcagcacaggacctggtgttccgatctcgtgaaggccctgaacacccctttcggatacaacctggccaggtacaagaacctctccatcgacggactgttcgacagggagggcgatcatgtggtgagagaggatggcgaaaaacctgccgaa

SEQ ID NO: 143 - DNA, 2835 bp, Artificial Sequence
  Human codon-optimized Anaerobic Digester  nCas1
aacaacaagagaaaaacaaaggctaaagccgccggcctgaagagcgtttttttcgatcagaagcaggccgtcctgaccacattcgctaaaggcaacaacagccagatcgagaagaaggtggtcaatagcgaagtgaaggacctgagacagccccctgcctttgacctcgaactgaaagaaaaaactttttacatcagcggaaagaataatatcaacaccagcagagagaaccctctggccagcgccagcctgcctctgtccaaaaggcagaggattagggctgagaggatcaagagggccagagaggagaacaggccctaccacaacgtcaaaagggtcggcgaggatgatctgagggccaaagccgacctggagaagcattattttggaaaggaatacagcgataatctcaagatccagatcatttataacattctggacatcaataagatcatcagcccctacatcaatgacatcgtgtactccatgaacaatctggccaggaatgatgagtatatcgacggcaagatcgatgtgatcggttctctgtcctccaccacagactatagcagcttcatgagccccaataaggatctggaaaaggagaagaaattcagctttcacagagaaaactataaaaaatttgtcgaggcctccaagccctacatgagatattacggcaaagtctttatcagggacgtgaaaaaatccaagctgtccaccggcaagggcgaaaagatcgaggtgatgtacaggagcgatgaagagattttcaccatcttccaaatcctgtcctacgtgaggcagagcatcatgcataatgacattggcaacaagagcagcatcctcgccatcgaaaaataccccgccagattcgtgggcttcctgtccgacctcttaaaaactaagaccaacgacgtgaacaggatgttcatcgataacaatagccagacaaatttctgggtcctgttctccatcttcggcctccaggaccatacaagcggcgctgataagatctgcaggaacttctatgatttcgtgatcaaggccgacagcaagaacctgggattctccctgaaaaagatcagggagctcatgctggacctccctaacgctaacatgctcagggatcaccagttcgacacagtgaggagcaagttctataccctcctcgactttatcatttaccagcattacctggaagagaagagcaggatcgacaacatggtcgagaagctcaggatgaccctgaaagaagaggagaaggaggtgctctacgctgccgaagccaagatcgtgtggaatgccattggcgccaaggtcatcaacaagctggtgcctatgatgaacggtgatgctctgaaggagattaaaagaaagaacagggataggaagctgccccagtccgtgatcgctaccgtccaggtgaatagcgatgccaatgtgttttccggcctcatctacttcctcaccctcttcctggacggcaaagagattaacgagatggtgagcaatctcatcaccaagttcgagaatatcgactccctgctgcatgtggatagggagatctataagtccgacgagaaggacctcgacctcgaaatcgagaaactggctctgtttttcaaaggcgtggtcaggcccaacgccaaaacagacacaggagctggcgaaatcagcaagagcttcagcattttccagagcgccgagaggatcatcgaggagctgaaatttatcaagaatgtgacaaggatggacaacgagatctttcccagcgagggagtgttcctggatgctgccaatgtgctgggcgtgagaggagatgacttcgacttttccaacgagttcgtcggcgatgacctccactccgatgccaataaaaagatcatcaacaaaatcaatggcaccaaggaggacaggaacctcagaaacttcattattaataatgtggtgaagagcaggaggttccaatacatcgccaggcacatgaatacccactatgtgaagcagctggccaacaacgagacactgaacaggttcgtgctcaacaaaatgggcgacgccaagattatcaacaggtactatgagtccatcagcggcaacacccccaatatcgaggtcagatcccagattgactacctcgtcaaaagactcaggagcttctccttcgaggacctcaatgacgtgaagcaaaaagtcagacccggcaccaacgaatccatcgagaaggaaaagaaaaaggctctcgtcggactctgcctgacaatccaatatctggtgtacaaaaacctggtcaacatcaacgctaggtacaccacagccttctactgcctggaaagggattccaagctgaagggctttggcgtggatgtgtggagggatttcgagagctacaccgctctgaccaaccacttcatcaaggaaggctatctccccgtcaggaaggccgagattctgagagccaatctgaagcatctggactgcgaggacggcttcaagtattacagaaaccaggtcacccatctgaacgccatcagagtggcttataagtatattaacgaaattaagtccgtgcacagctactttgccctgtaccactacatcatgcagaggcacctctatgactccctccaagccaaagccaaggatagctccggcttcgtcattgacgccctgaagaagtccttcgaacataaaatctacagcaaagacctcctgcacgtgctccattcccctttcggctacaacaccgccaggtacaagaacctgagcatcgaggctctgttcgacaagaatgagagcaggcctgaagtcaaccccctctccaccaacgac

SEQ ID NO: 144 - DNA, 2898 bp, Artificial Sequence
  Human codon-optimized Ruminococcus flavefaciens XPD nCas1
atcgaaaaaaaaaagtccttcgccaagggcatgggcgtgaagtccacactcgtgtccggctccaaagtgtacatgacaaccttcgccgaaggcagcgacgccaggctggaaaagatcgtggagggcgacagcatcaggagcgtgaatgagggcgaggccttcagcgctgaaatggccgataaaaacgccggctataagatcggcaacgccaaattcagccatcctaagggctacgccgtggtggctaacaaccctctgtatacaggacccgtccagcaggatatgctcggcctgaaggaaactctggaaaagaggtacttcggcgagagcgctgatggcaatgacaatatttgtatccaggtgatccataacatcctggacattgaaaaaatcctcgccgaatacattaccaacgccgcctacgccgtcaacaatatctccggcctggataaggacattattggattcggcaagttctccacagtgtatacctacgacgaattcaaagaccccgagcaccatagggccgctttcaacaataacgataagctcatcaacgccatcaaggcccagtatgacgagttcgacaacttcctcgataaccccagactcggctatttcggccaggcctttttcagcaaggagggcagaaattacatcatcaattacggcaacgaatgctatgacattctggccctcctgagcggactgaggcactgggtggtccataacaacgaagaagagtccaggatctccaggacctggctctacaacctcgataagaacctcgacaacgaatacatctccaccctcaactacctctacgacaggatcaccaatgagctgaccaactccttctccaagaactccgccgccaacgtgaactatattgccgaaactctgggaatcaaccctgccgaattcgccgaacaatatttcagattcagcattatgaaagagcagaaaaacctcggattcaatatcaccaagctcagggaagtgatgctggacaggaaggatatgtccgagatcaggaaaaatcataaggtgttcgactccatcaggaccaaggtctacaccatgatggactttgtgatttataggtattacatcgaagaggatgccaaggtggctgccgccaataagtccctccccgataatgagaagtccctgagcgagaaggatatctttgtgattaacctgaggggctccttcaacgacgaccagaaggatgccctctactacgatgaagctaatagaatttggagaaagctcgaaaatatcatgcacaacatcaaggaatttaggggaaacaagacaagagagtataagaagaaggacgcccctagactgcccagaatcctgcccgctggccgtgatgtttccgccttcagcaaactcatgtatgccctgaccatgttcctggatggcaaggagatcaacgacctcctgaccaccctgattaataaattcgataacatccagagcttcctgaaggtgatgcctctcatcggagtcaacgctaagttcgtggaggaatacgcctttttcaaagactccgccaagatcgccgatgagctgaggctgatcaagtccttcgctagaatgggagaacctattgccgatgccaggagggccatgtatatcgacgccatccgtattttaggaaccaacctgtcctatgatgagctcaaggccctcgccgacaccttttccctggacgagaacggaaacaagctcaagaaaggcaagcacggcatgagaaatttcattattaataacgtgatcagcaataaaaggttccactacctgatcagatacggtgatcctgcccacctccatgagatcgccaaaaacgaggccgtggtgaagttcgtgctcggcaggatcgctgacatccagaaaaaacagggccagaacggcaagaaccagatcgacaggtactacgaaacttgtatcggaaaggataagggcaagagcgtgagcgaaaaggtggacgctctcacaaagatcatcaccggaatgaactacgaccaattcgacaagaaaaggagcgtcattgaggacaccggcagggaaaacgccgagagggagaagtttaaaaagatcatcagcctgtacctcaccgtgatctaccacatcctcaagaatattgtcaatatcaacgccaggtacgtcatcggattccattgcgtcgagcgtgatgctcaactgtacaaggagaaaggctacgacatcaatctcaagaaactggaagagaagggattcagctccgtcaccaagctctgcgctggcattgatgaaactgcccccgataagagaaaggacgtggaaaaggagatggctgaaagagccaaggagagcattgacagcctcgagagcgccaaccccaagctgtatgccaattacatcaaatacagcgacgagaagaaagccgaggagttcaccaggcagattaacagggagaaggccaaaaccgccctgaacgcctacctgaggaacaccaagtggaatgtgatcatcagggaggacctcctgagaattgacaacaagacatgtaccctgttcagaaacaaggccgtccacctggaagtggccaggtatgtccacgcctatatcaacgacattgccgaggtcaattcctacttccaactgtaccattacatcatgcagagaattatcatgaatgagaggtacgagaaaagcagcggaaaggtgtccgagtacttcgacgctgtgaatgacgagaagaagtacaacgataggctcctgaaactgctgtgtgtgcctttcggctactgtatccccaggtttaagaacctgagcatcgaggccctgttcgataggaacgaggccgccaagttcgacaaggagaaaaagaaggtgtccggcaattcc

SEQ ID NO: 145 - DNA, 2829 bp, Artificial Sequence
  Human codon-optimized Ruminococcus albus nCas1
gccaagaagtccaagggaatgtccctcagggagaagagggagctggagaagcaaaagaggattcagaaggccgccgtgaatagcgtgaacgatacccctgaaaaaactgaggaggctaatgtggtcagcgtgaacgtgagaaccagcgccgagaacaagcactccaaaaagagcgctgccaaagccctgggcctgaaaagcggcctcgtgattggagatgagctctacctgaccagcttcggaaggggcaacgaagccaagctggagaagaagattagcggcgacaccgtggagaaactgggaattggcgcctttgaggtcgccgaacgtgatgaaagcacactcacactcgagagcggcaggatcaaagacaaaaccgccaggcctaaggaccccagacatattaccgtggacacccagggaaagtttaaggaggacatgctgggcatcaggtccgtgctcgaaaagaagatctttggaaaaaccttcgacgataacatccacgtccagctggcctacaacatcctggacgtcgagaagatcatggctcagtatgtgagcgacatcgtctacatgctgcacaacaccgacaagaccgagaggaacgataacctgatgggatacatgtccattagaaatacctacaaaaccttctgcgacacatccaatctgcccgacgacacaaagcagaaggtggagaatcagaaaagggaattcgacaagatcattaagagcggcagactgggctacttcggcgaagctttcatggtcaacagcggcaactccaccaagctgaggcccgagaaagagatttatcatatcttcgccctcatggccagcctgaggcagagctacttccacggatacgtcaaggataccgactatcagggcacaacatgggcctacacactggaggataagctgaagggccccagccatgaatttagggagacaatcgacaagatctttgacgagggattcagcaagatctccaaggacttcggaaaaatgaacaaagtgaatctccaaatcctggagcagatgatcggcgagctgtacggaagcatcgaaaggcagaacctgacctgcgattactacgattttattcaactcaagaagcacaagtatctcggctttagcatcaagaggctgagagagacaatgctcgagacaacccctgccgagtgttataaggctgagtgctacaatagcgagaggcaaaagctctacaagctgatcgacttcctcatctacgacctctactataacaggaagcccgccagaatcgaagagatcgtcgacaagctgagagagagcgtcaacgacgaggagaaggagagcatctatagcgtggaggccaagtacgtgtatgagtccctgagcaaggtgctggataagagcctgaagaattccgtgtccggcgaaactatcaaggatctgcagaagaggtacgacgacgaaactgccaacagaatttgggacatctcccagcactccatttccggcaatgtcaactgcttctgcaagctgatctacattatgaccctcatgctggatggaaaggagatcaacgacctcctcaccaccctggtgaacaagtttgacaatattgcttcctttattgacgtgatggacgaactcggcctggaacacagctttacagacaactacaagatgtttgccgacagcaaggccatctgcctggacctgcaattcatcaatagctttgctagaatgagcaagatcgacgacgagaaaagcaagagacagctgttcagggatgctctggtgatcctcgatatcggaaacaaggacgaaacttggattaacaactacctcgactccgacatcttcaagctggacaaggaaggcaacaagctgaagggagccaggcatgactttaggaattttatcgccaataatgtcattaagtcctccagattcaagtacctcgtcaaatacagctccgccgacggcatgattaagttaaaaactaacgaaaagctgattggcttcgtgctcgacaagctccccgaaactcaaatcgataggtactacgaatcctgcggcctcgacaatgccgtcgtggacaagaaggtgaggatcgagaaactgtccggactcatcagggacatgaagttcgacgatttttccggcgtcaagacctccaataaggccggcgacaacgataagcaggacaaggccaagtaccaggccattatctccctgtacctgatggtgctctaccagattgtgaagaatatgatctacgtcaacagcaggtatgtgattgccttccactgcctggagagggacttcggaatgtacggcaaggatttcggcaagtactaccagggctgtaggaagctcaccgatcatttcatcgaggagaaatacatgaaggagggcaagctgggctgtaacaagaaagtcggcaggtacctgaagaataacatcagctgttgcaccgacggcctgattaacacctacaggaaccaggtcgatcatttcgccgtcgtcagaaaaatcggaaattacgccgcctacatcaaatccattggcagctggttcgagctctatcattacgtgattcagaggatcgtttttgacgaatatagattcgccctcaacaacaccgagtccaactataagaacagcatcattaagcaccatacatactgcaaggacatggtgaaggccctgaatacccctttcggctacgacctgcccagatataaaaacctgagcattggtgatttattcgacaggaacaactatctgaacaaaacaaaggagtccatcgatgccaactccagcattgatagccag

SEQ ID NO: 146 - DNA, 330 bp, Artificial Sequence
  exemplary processed Ruminococcus sp. CAG:57 CRISPR array
ctactacactggtgcgaatttgcactagtctaaaacaagctttttcttcattgtctacaaatgcaactactacactagtgcgaatttgcactagtctaaaactctatgtagcttttcttgtaaaacatatttctactacactggtgcgattttgcactagtctaaaactcatctgccttctgcatatcggacacttgactactacaccggtgcgaatttgcactagtctaaaacttacacctccttatgcgattttatcgtgcgctactacactggtgcgaatttgcactagtctaaaacttcatcttcaagaccgagcagggacatcat

SEQ ID NO: 147 - protein, 939 aa, Artificial Sequence
  Metagenomic hit (no protein accession):  contig emb|OBVH01003037.1, human gut metagenome sequence (al so found in WGS contigs emb|OBXZ01000094.1| and emb|OBJF01000033.1|)
MAKKKRITAKERKQNHRELLMKKADSNAEKEKAKKPVVENKPDTAISKDNTPKPNKEIKKSKAKLAGVKWVIKANDDVAYISSFGKGNNSVLEKRIMGDVSSNVNKDSHMYVNPKYTKKNYEIKNGFSSGSSLVTYPNKPDKNSGMDALCLKPYFEKDFFGHIFTDNMHIQAIYNIFDIEKILAKHITNIIYTVNSFDRNYNQSGNDTIGFGLNYRVPYSEYGGGKDSNGEPKNQSKWEKRDNFIKFYNESKPHLGYYENIFYDHGEPISEEKFYNYLNILNFIRNNTFHYKDDDIELYSENYSEEFVFINCLNKFVKNKFKNVNKNFISNEKNNLYIILNAYGKDTENVEVVKKYSKELYKLSVLKTNKNLGVNVKKLRESAIEYGYCPLPYDKEKEVAKLSSVKHKLYKTYDFVITHYLNSNDKLLLEIVETLRLSKNDDEKENVYKKYAEKLFKADDVINPIKAISKLFARKGNKLFKEKIIIKKEYIEDVSIDKNIYDFTKVIFFMTCFLDGKEINDLLTNIISKLQVIEDHNNVIKFISNNKDAVYKDYSDKYAIFRNAGKIATELEAIKSIARMENKIENAPQEPLLKDALLSLGVSDDTKVLENTYNKYFDSKEKTDKQSQKVSTFLMNNVINNNRFKYVIKYINPADINGLAKNRYLVKFVLSKIPEEQIDSYYKLFSNEEEPGCEEKIKLLTKKISKLNFQTLFENNKIPNVEKEKKKAIITLYFTIVYILVKNLVNINGLYTLALYFVERDGYFYKDICGKKDKKKSYNDVDYLLLPEIFSGSKYREETKNLKLPKEKDRDIMKKYLPNDKDREKYNKFFTAYRNNIVHLNIIAKLSELTKNIDKDINSYFDIYHYCTQRVMFNYCKEKNDVVLAKMKDLAHIKSDCNEFSSKHTYPFSSAVLRFMNLPFAYNVPRFKNLSYKKFFDKQ

SEQ ID NO: 148 - DNA, 36 bp, Artificial Sequence
  DR sequence
gattgaaaggattgtaaatttgcaaggtcttaaaac

SEQ ID NO: 149 - protein, 958 aa, Artificial Sequence
  Metagenomic hit (no protein accession):  contig tpg|DBYI01000091.1| (Uncultivated Ruminococcus flavef aciens UBA1190 assembled from bovine gut metagenome)
MKKKIKARDLREAKKQEKLAAFSAKANTVYENEDKNVEAFPEALNLRSIKKSMNKAAGLKSTLIDGKSLYLTAFGKGNNAVVEHMIATDDSYSLKTLENEPSLKVKAADELKVTFMSRRPFVQESELSAVNPLHSGKDKPNKSAGQDMLGLKSELEKRYFGKIFDDNLHIQIIHNILDIEKIIAVYATNITAAIDHMVDDDNEQYLQGDFIGYMNTLNTYEVFMEPSKNPRLDSNARKNIENSREKFEYLLDTQRLGYLSLEYDKRSKDKRKSEEIKKRLYHLVAFAGQLRQWSFHSVEGLPRTWIYQLDNPKLAQEYRDTLDYFFNERFDAINKDFIETNNINLHILKEVFPAEDFQKLAALYYDFIVKKTFKNIGFSIKNLREQMLECDEAEKIRSKDMNSVRSKLYKLFDFCIFYQYFIDEERSRENVNYLRSTLNDEQKDAFYEEEGKRLWSENRKKFIYFCDNINKWVKNDYSDEVAKCIDLNEFRVNSNVSYFSKLLYAMSFFLDGKEINDLLTTLINKFDNIRSFIDTANFLNIDVKFTKDYDFFNIICDYAGELNIIKNIARMKKPSPSAKKNMYRDALTILGIPTEMSDEQLDAEIDKILEKKINPVTGKTEKGKNPFRNFIANNVIENKRFIYVIKFCNPKNVRKLVNNTKVTEFVLKRMPETQIDRYFESCIEGNLNPTTEKKIEKLAEMIKNIKFEEFRNVKQKVRDNSQEAVEKERFKAIIGLYLTVIYLLVKNLVNVNSRYVMAFHCLERDAKLYGVQNIGGDYLALTAKLCAEGDDYGKKLSEAKQNINQDKVQMPKNYFLARNKRWREAIEQDIDNAKKWFIGEKFNNVKNYRNNVAHLTAIRNCAEFIGEITKIDSYFALYHYLIQRQLAGRLDPNHPGFEKNYPQYAPLFKWNTYVKDMVKALNSPFGYNIPRFKDLSIDALFDRNEMKEETDDEKKIQT

SEQ ID NO: 150 - DNA, 36 bp, Artificial Sequence
  DR 1
gaactatacccctaccaaatggtcggggtctgaaac

SEQ ID NO: 151 - DNA, 37 bp, Artificial Sequence
  DR 2
tgaactacacccctgccaagtggttggggtctgaaac

SEQ ID NO: 152 - DNA, 36 bp, Artificial Sequence
  DR 3
gaactacacccctaccaagtggttggggtctgaaac

SEQ ID NO: 153 - protein, 877 aa, Artificial Sequence
  Metagenomic hit (no protein accession):  contig tpg|DJXD01000002.1| (uncultivated Ruminococcus assemb ly, UBA7013, from sheep gut metagenome)
MKKQKSKKTVSKTSGLKEALSVQGTVIMTSFGKGNMANLSYKIPSSQKPQNLNSSAGLKNVEVSGKKIKFQGRHPKIATTDNPLFKPQPGMDLLCLKDKLEMHYFGKTFDDNIHIQLIYQILDIEKILAVHVNNIVFTLDNVLHPQKEELTEDFIGAGGWRINLDYQTLRGQTNKYDRFKNYIKRKELLYFGEAFYHENERRYEEDIFAILTLLSALRQFCFHSDLSSDESDHVNSFWLYQLEDQLSDEFKETLSILWEEVTERIDSEFLKTNTVNLHILCHVFPKESKETIVRAYYEFLIKKSFKNMGFSIKKLREIMLEQSDLKSFKEDKYNSVRAKLYKLFDFIITYYYDHHAFEKEALVSSLRSSLTEENKEEIYIKTARTLASALGADFKKAAADVNAKNIRDYQKKANDYRISFEDIKIGNTGIGYFSELIYMLTLLLDGKEINDLLTTLINKFDNIISFIDILKKLNLEFKFKPEYADFFNMTNCRYTLEELRVINSIARMQKPSADARKIMYRDALRILGMDNRPDEEIDRELERTMPVGADGKFIKGKQGFRNFIASNVIESSRFHYLVRYNNPHKTRTLVKNPNVVKFVLEGIPETQIKRYFDVCKGQEIPPTSDKSAQIDVLARIISSVDYKIFEDVPQSAKINKDDPSRNFSDALKKQRYQAIVSLYLTVMYLITKNLVYVNSRYVIAFHCLERDAFLHGVTLPKMNKKIVYSQLTTHLLTDKNYTTYGHLKNQKGHRKWYVLVKNNLQNSDITAVSSFRNIVAHISVVRNSNEYISGIGELHSYFELYHYLVQSMIAKNNWYDTSHQPKTAEYLNNLKKHHTYCKDFVKAYCIPFGYVVPRYKNLTINELFDRNNPNPEPKEEV

SEQ ID NO: 154 - DNA, 36 bp, Artificial Sequence
  DR
caactacaaccccgtaaaaatacggggttctgaaac

SEQ ID NO: 155 - protein, 984 aa, Artificial Sequence
  Metagenomic hit (no protein accession): contig OGZC01000639.1  (human gut metagenome assembly)
MKKKNIRATREALKAQKIKKSQENEALKKQKLAEEAAQKRREELEKKNLAQWEETSAEGRRSRVKAVGVKSVFVVGDDLYLATFGNGNETVLEKKITPDGKITTFPEEETFTAKLKFAQTEPTVATSIGISNGRIVLPEISVDNPLHTTMQKNTIKRSAGEDILQLKDVLENRYFDRSFNDDLHIRLIYNILDIEKILAEYTTNAVFAIDNVSGCSDDFLSNFSTRNQWDEFQNPEQHREHFGNKDNVICSVKKQQDLFFNFFKNNRIGYFGKAFFHAESERKIVKKTEKEVYHILTLIGSLRQWITHSTEGGISRLWLYQLEDALSREYQETMNNCYNSTIYGLQKDFEKTNAPNLNFLAEILGKNASELAEPYFRFIITKEYKNLGFSIKTLREMLLDQPDLQEIRENHNVYDSIRSKLYKMIDFVLVYAYSNERKSKADALASNLRSAITEDAKKRIYQNEADQLWTSYQELFKRIRGFKGAQVKEYSSKNMPIPIQKQIQNILKPAEQVTYFTKLMYLLTMFLDGKEINDLLTTLINKFDNISSLLKTMEQLELQTTFKEDYTFFQQSSRLCKEITQLKSFARMGNPISNLKEVMMVDAIQILGTEKSEQELQSMACFFFRDKNGKKLNTGEHGMRNFIGNNVISNTRFQYLIRYGNPQKLHTLSQNETVVRFVLSRIAKNQRVQGMNGKNQIDRYYETCGGTNSWSVSEEEKINFLCKILTNMSYDQFQDVKQSGAEITAEEKRKKERYKAIISLYLTVLYQLIKNLVNINARYIIAFHCLERDAILYSSKFNTSINLKKRYTALTEMILGYETDEKARRKDTRTVYEKAEAAKNRHLKNVKWNCKTRENLENADKNAIVAFRNIVAHLWIIRDADRFITGMGAMKRYFDCYHYLLQRELGYILEKSNQGSEYTKKSLEKVQQYHSYCKDFLHMLCLPFAYCIPRYKNLSIAELFDRHEPEAEPKEEASSVNNSQFITT

SEQ ID NO: 156 - DNA, 33 bp, Artificial Sequence
  DR 1
actacaatccatggttatcgtggatactaaaac

SEQ ID NO: 157 - DNA, 33 bp, Artificial Sequence
  DR 2
actacaatccacgtttatcgtggatactaaaac

SEQ ID NO: 158 - protein, 978 aa, Artificial Sequence
  Metagenomic hit (no protein accession): contig emb|OHBM01000764.1 (human gut metagenome assembly)
  SITE (1)..(222): Xaa can be any naturally occurring amino acid
XXXXXXXXXXXXXXXXXXXXXXXXXXXXXXXXXXXXXXXXXXXXXXXXXXXXXXXXXXXXXXXXXXXXXXXXXXXXXXXXXXXXXXXXXXXXXXXXXXXXXXXXXXXXXXXXXXXXXXXXXXXXXXXXXXXXXXXXXXXXXXXXXXXXXXXXXXXXXXXXXXXXXXXXXXXXXXXXXXXXXXXXXXXXXXXXXXXXXXXXXXXXXXXXXXXXXXXXXXXXXXHPLQKRYRYLTSTNLKSFETYKNNLVNKKKFDLDRVKKIPQLAYFGSAFYNTPEDTSAKITKTKIKSNEEIYYTFMLLSTARNFSAHYLDRNRAKSSDAEDFDGTSVIMYNLDNEELYKKLYNKKVHMALTGMKKVLDANFNKKVEHLNNSFIKNSAKDFVILCEVLGIKSRDEKTKFVKDYYDFVVRKNYKHLGFSVKELRELLFANHDSNKYIKEFDKISNKKFDSVRSRLNRLADYIIYDYYNKNNAKVSDLVKYLRAAADDEQKKKIYLNESINLVKSGILERIKKILPKLNGKIIGNMQPDSTITASMLHNTGKDWHPISENAHYFTKWIYTLTLFMDGKEINDLVTTLINKFDNIASFIEVLKSQSVCTHFSEERKMFIDSAEICSELSAMNSFARMEAPGASSKRAMFVEAARILGDNRSKEELEEYFDTLFDKSASKKEKGFRNFIRNNVVDSNRFKYLTRYTDTSSVKAFSNNKALVKFAIKDIPQEQILRYYNSCFGASERYYNDGMSDKLVEAIGKINLMQFNGVIQQADRNMLPEEKKKANAQKEKYKSIIRLYLTVCYLFFKNLVYVNSRYYSAFYNLEKDRSLFEINGELKPTGKFDEGHYTGLVKLFIDNGWINPRASAYLTVNLANSDETAIRTFRNTAEHLEALRNADKYLNDLKQFDSYFEIYHYITQRNIKEKCEMLKEQTVKYNNDLLKYHGYSKDFVKALCVPFGYNLPRFKNLSIDALFDKNDKREKLKKGFED

SEQ ID NO: 159 - DNA, 36 bp, Artificial Sequence
  DR
gaactacagccctccttaaatggggggttctaaaac

SEQ ID NO: 160 - protein, 1023 aa, Artificial Sequence
  Metagenomic hit (no protein accession): contig emb|OHCP01000044.1 (human gut metagenome assembly)
MAKKITAKQKREEKERLNKQKWAKNDSVIIVPETKEEIKTGEIQDNNRKRSRQKSQAKAMGLKAVLSFDNKIAIASFVSSKNAKSSHIERITDKEGTTISVNSKMFESSVNKRDINIEKRITIEEPQQDGTIKKEEKGVKSTTCNPYFKVGGKDYIGIKEIAEEHFFGRAFPNENLRVQIAYNIFDVQKILGTFVNNIIYSFYNLSRDEVQSDNDVIGMLYSISDYDRQKETETFLQAKSLLKQTEAYYAYFDDVFKKNKKPDKNKEGDNSKQYQENLRHNFNILRVLSFLRQICMHAEVHVSDDEGCTRTQNYTDSLEALFNISKAFGKKMPELKTLIDNIYSKGINAINDEFVKNGKNNLYILSKVYPNEKREVLLREYYNFVVCKEGSNIGISTRKLKETMIAQNMPSLKEENTYRNKLYTVMNFILVRELKNCATIREQMIKELRANMDEEEGRDRIYSKYAKEIYLYVKDKLKLMLNVFKEEAEGIIIPGKEDPVKFSHGKLDKKEIESFCLTTKNTEDITKVIYFLCKFLDGKEINELCCAMMNKLDGISDLIETAKQCGEDVEFVDQFKCLSKCATMSNQIRIVKNISRMKKEMTIDNDTIFLDALELLGRKIEKYQKDKNGDYVKDEKGKKVYTKDYNNFQDMFFEGKNHRVRNFVSNNVIKSKWFSYVVRYNKPAECQALMRNSKLVKFALDELPDSQIEKYYISVFGEKSSSSNEEMRRELLKKLCDFSVRGFLDEIVLLSEDEMKQKDKFSEKEKKKSLIRLYLTIVYLITKSMVKINTRFSIACATYERDYILLCQSEKAERAWEKGATAFALTRKFLNHDKPTFEQYYTREREISAMPQEKRKELRKENDQLLKKTHYSKHAYCYIVDNVNNLTGAVANDNGRGLPCLSEKNDNANLFLEMRNKIVHLNVVHDMVKYINEIKNITSYYAFFCYVLQRMIIGNNSNEQNKFKAKYSKTLQEFGTYSKDLMWVLNLPFAYNLPRYKNLSNEQLFYDEEERMEKIVGRKNDSR

SEQ ID NO: 161 - DNA, 36 bp, Artificial Sequence
  DR
gtactaaagcccgctagtatagacgggttctaagac

SEQ ID NO: 162 - protein, 926 aa, Artificial Sequence
  Metagenomic hit (no protein accession): contig emb|OGDF01008514.1| (human gut metagenome assembly)
MTETKPKREDIAKTPAAKSRSKAAGLKSTFAVNGSVLLTSFGRGNDAVPEKLITEKAVSEINTVKPRFSVEKPATSYSSSFGIKSHISATADNPLAGRAPVGEDAIHAKEVLEQRVFGKTFSDDNIHIQLIYNILDIRKILSTYANNVVFTINSMRRLDEYDREQDYLGYLYTGNSYERLLDIADKYAVDGEDWRNTAAGISNDFEKKQFQTINGFWDLLDMIEPYMCYFSEAFFCETTVKDPDSGRIVPCLEQRSDGDIYNILRILSIVRQTCMHDNASMRTVMFTLGQNSVRDRKNGFDELAELLDYLYDEKIDIVNRDFLRNQKNNIELLSRIYGSSADSPERDRLVQNFYDFRVLSQDKNLGFSIKKLREKLLDSPALSVVRSKKYDTMRSKIYSLIDFMIYRKFSENHVAVDDFVEELRSLLTEDEKESAYSRWAETLINDGFAQEILVKLLPQTDPAVIGKIKGKKLLNDSIAGIKLKKDASFFTKIINVLCMFQDGKEINELVSSLVNKFANIQSFVDVMRSQGIDSGFTADYAMFAESGRISRELHILKGIARMQHSIAGLGDVKIYGSDDKFHGVSRRVYTDAAYILGFGERSEDNDGYVDDYVSSKLLGGADKNLRNFITNNVIKNRRFLYTVRYMNPKRAKKLVQNDALVVLALSGIPETQIDRYYKSCIEKRSFNPDLNEKIAALSEMITTLKIDDFEDVKQNPEKNANYEAKKNQRISKERYKACIGLYLTVLYLICKNLVKINARYSIAIGCLERDTQLHGVDFKGAAYMTRDVFIAKGWINPKKPTVKSIKEQYAFLTPYIFTTYRNMIAHLAAVTNAYKYIPQMDRFKSWFHLYHTVIQHSLIQQYEYDRDYGRKGAPVVSERVLQLLEQCREHSNYSRDLLHILNLPFGYNLPRYLNLSSEKYFDANAI

SEQ ID NO: 163 - DNA, 36 bp, Artificial Sequence
  DR
ctactacactggtgcgaatttgcactagtctaaaac

SEQ ID NO: 164 - protein, 1030 aa, Artificial Sequence
  Metagenomic hit (no protein accession): contig emb|OGPN01002610.1 (human gut metagenome assembly)
MAKKITAKQKREEKERLNKQKWAKQDTPVVPKSKTEEKPVAASDDKLLKTTQVKKVQTKSKAKAMGLKTVLSFDDKIAIASFVNDKKTKLPHIERITDKSGTTIHENARMFDSSVDEQNVNIEKRMTIEEKQNDGTFKKDEKDVKATICNPYFKTCGKDYIGIKDVAEKYFFGKTFPNENLRVQIAYNVFDIQKILGTYVNNIIYSFYNLRRDGKSDVDIIGSLYAFADFDNQLKDKPAFREAKDLLKNTEAYFSYFGDVFKKSKKGKKDENNEDYEKNLRHNFNVLRVLSFLRQICTHAYVKCTGGAKNNGDSTKVEAESLDALFNITEYFAKTAPELSKTINEIYKEGIDRINNDFVTNGKNNLYILSKVYPDMQRNELVKKYYQFVVCKEGNNVGINTRKLKESIISQHPWITTPQDNNKANDYESCRHKLYTIMCFILVAELDAHESIRDNMVAELRANMDGDDGRDAIYEKYAKDIYHIVKDKLLAMQKVFDEELVPVKVEGKNDPQQFTHGKLGKKEIESFCLSDKNTSDIAKVVYFLCNFLDGKEINELCCAMMNKFDGIGDLIDTAKQCGEEVKFIEEFACLSNCRKITNDIRVAKSISKMKNKVNIDNDIIYLDAIELLGRKIEKYQKDENGKILLGTDGKRLYTQEYKYFNDMFFNAGNHKVRNFIANNVMQSKWFFYVVRYNKPAECQIIMRNKTLVKFTLDDLPDMQIQRYYSSVFGDNNMPAVDEMRKRLLDKINQFSVRGFLDELDEIVLMSDEESKRNKSSEKEQKKSLIRLYLTIAYLITKSMVKINTRFSIACAMYERDYALLCQSEMKGGPWDGGAQALAVTRKFLNHDREVFDRYCAREAEIARLPSEERKPLRKANDKLLKQTHYTNHSYTYIVNNLNSFTDIDYCAKDVGLPAPNDKNDNASILGEMRNDIAHLNIVHDMVKYIEELKDISSYYAFYCYVLQRRLVGKDPNCQNKFKAKYAKELNDYGTYNKNLMWMLNLPFAYNLPRYKNLSSEFLFYDMEYNKKDDE

SEQ ID NO: 165 - DNA, 35 bp, Artificial Sequence
  DR
gaacccgtctatactagcgggctttagtacaaaac

SEQ ID NO: 166 - protein, 1001 aa, Artificial Sequence
  Metagenic hit (no protein accession): contig NFIR01000008.1  (Eubacterium sp. An3, from chicken gut m etagenome)
MAKKLRPKELREKRRMAEKEEHKKQEKLRKEQEELRKKQEKQREDQKELEKIKKEEGGEGEKKKSGAKALGLKSTFILDRDEQKMLMTSFGRGNKAVRDKYIIGDKVSDIDDSWENKKAALSVEVCGKSFNISKKENDDCEPVKVNNPVLSGNKKDDDLIHCRKNLEEMYFGQQFKDNIHIQLIYNILDIEKILAVQINNIVFILNNLLRWSGEEEFDLIGSLGVNHTYEEFRGRNKNYGKFSELIKQSQMRYFGSTFCLFNENEERITSENKKEWKRFEKKCYHLLAVLGMMRQATAHGDSKRRAEIYKLGKEFDRLEARGCRPEARKELDELYKKKIHEMNQGFLKNSKSDILMLFRIYNAESKEAKRKLAQEYYEFIMLKSYKNTGFSIKHLRETMIDKMDEDKKEKLKDDKYNPIRRKIYRIMDFMIYQYYQEPEHQEEAEELVRKLRNAEIEAKKELAYRKEAEKLKKELEKIIFNSVLPSCDRILSEMDERRNKKVNQESSDTDKEEPLDSEIAEGITFIKETAHSFSEMIYLLTVFLDGKEINILLTQLIHCFDNISSFMDTMEEENLLTKLKEDYEIFEESKEISRELRIINSFARMTEPVPKTERIMFIEAAQILGYSNGEKELEGYVDALLDTKNKTNDKKKKGFVRYIWNNVIKSTRFRYLVRYADPKKVRAFAANKKVVAFVLKDIPDDQIRAYYNSCFRQNSDSSSNNSNASWDADSNKRDISVSDMRKALTEKITGLNFGDFEEESKKGIRKEESDKNIIRLYLTVLYLVQKNLIYVNSRYFLAFHCAERDEMLYNGETIDNNKEKGSEKDWRKFAKQFIMEHSPKKKVKDYLAKNFEYSNKWSLKEFRNSVQHLNVIRDAHKYIKYINDNKDVQSYFALYHYLVQRYISERAANRTDKESLSEGRLQYYLSQVKEYRTYCKDFVKALNVPFAYNLPRYKNLSIDELFDRNNYLPNKAKKWIPEKKENGEYVMEDCGNKDAGQVENA

SEQ ID NO: 167 - DNA, 35 bp, Artificial Sequence
  DR
gaactacactctggctgaaagtcagggtctaaaac

SEQ ID NO: 168 - protein, 1006 aa, Artificial Sequence
  Metagenomic hit (no protein accession): contig NFLV01000009.1  (Eubacterium sp. An11, from chicken gu t metagenome)
MSKKQRPKDIRKRQEEEKREKYKKQEELRKKQEELRKEQEQRREDQKELEKIKKEVGEEGEKKKSRAKALGLKSTFILDRDEQKVLMTSFGQGNKAVRDKYIIGDKVSDINDDRKNKKAALLVEVCGKSFNISKKENDDCDPVKVNNPVVSRNKKDDDLIHCRKKLEELYFGEQFKDNIHIQLIYNILDIEKILAVQVNNIVFALNNLLSWSGEEKFDLIGYLGVNDTYEKFRDAKGKRKGLYEKFSTLIEKKRMRYFGSTFYPLNEKGEEITSNDKKEWEQFEKKCYHLLAVLGMMRQATAHGDSKRRAEIYKLGKEFDKSEARGCRQEARKELDDLYRKKIHEMNQSFLKNSKRDILMLFRIYDAESKEAKRKLAQEYYEFIMLKSYKNTGFSIKHLRETVIDKMDEDIKEKIKDDKYNPIRRKLYRIMDFVIYQYYQESEQQEEAMELVRKLRNAETKVEKELTYRKEAEKLKEELEKIIRNSILSVCDRILAEMNEKRHKKVNQESSDTDSEEPLDPEISEGITFIKETAHSFSEMIYLLTVFLDGKEINILLTQLIHCFDNISSFMDTMKEENLLTKLKEDYEIFEESKEISKELRIINSFARMTEPVPKTEKTMFIDAAQILGYSNDEKELEGYVDALLDTKNKTKDKERKGFEKYIWNNVIKSTRFRYLVRYADPKKVRAFAANKKVVAFVLKDIPDEQIKAYYNSCFSQNSDSSSNMSIAFQDGDSNKKGTSVHDMMRKALTEKITGLNFGDFEEESKKGIRREESDKNIIRLYLTVLYLVQKNLIYVNSRYFLAFHCAERDEVLYNGETIDNNKEKGSEKDWKKFAKEFIIEHPPKKKVKDYLAKNFEYSNKWSLRVFRNSVQHLNVIRDAYKYIKCIDDNKDVQSYFALYHYLVQRYISEMAENLTDKGELSEGRLQYYLSQVENYRTYCKDFVKALNVPFAYNLPRYKNLSIDELFDRNNYLPNKAKKWISEKKENGEYVMEDCGNKGAGQVENA

SEQ ID NO: 169 - DNA, 35 bp, Artificial Sequence
  DR
gaactacaccctggctgaaagtcagggtctaaaac

SEQ ID NO: 170 - protein, 1027 aa, Artificial Sequence
  Metagenomic hit (no protein accession): from contig emb|OBLI01020244 and emb|OBLI01038679 (from pig g ut metagenome)
MAKKITAKQRREERERQNKQKWAKKQADATAVFECEADIKPADSKDEDCTNIYIKREKKKTQAKAMGLKTVLGFDNKIAIASFMSSKDSKSSHIERITDPNGKTIREDVRMFDSNVDECSINLEKRMTVEERQKDGTIKKDEKDVKSTICNPYSNECGKDYIGIKSVAEELFFGRTFPNDNLRVQIAYNIFDIQKILGTYINNIIYSFYNLSRDESQSDNDVIGTLYMLKDFDGQKETDTFRQARALLERTEAYYSYFDNVFKKIDKNKKKSDDCKRERNEILRYNFNVLRVLSFLRQICAHAQVKISNEHDREKGGGLVDSLDALFNISRFFDAVAPELNEVINSVYSKGIDDINDNFVKNGKNNFYILSKIYPEVAREDLLREYYYFVVSKEGNNIGISTKKLKEAIIVQDMSYIKSEDYDTYRNKLYTVLCFILVKELNERTTIREQMVADLRANMNGDIGREDIYSKYAKIIYAQVKPRFDTMKSAFEEEAKDVIVPDKKKPVKFSHGKLDKNEIERFCITSANTDSVAKIIYFLCKFLDGKEINELCCAMMNKLDGINDLIETAEQCGAKVEFVDKFSVLSNCETISDQIRIVKSISKMKKEIAIDNDTIFLDALELLGRKIDKYKKDATGKYLKDENGKYLYSKEYDDFQYMFFKDSHRVRNFISNSVIKSKWFSYIVRYNQPSECRAIMKNKTLVKFALDELPDLQIQRYFVALYGDEDLPSYGEMRKILLKKLHDFSIKGFLDEIVLLSDLDMESQDKYCEKEQKKSLFRLYLTIAYLITKSMVKINTRFSIACATYERDYALLCASNKQERAWSSGATALALTRRFLNQDKLIFEKHYAREGEISKLPKEERKAMRKVNDQLLKRTHFSKHSYCYIVDNVNRLTGGECRTDKRVLPVLNEKNDNAGILLDFRKTIAHLNVVHKMVDYVDEIKGITSYYAFFCYVLQRMLVGNNLNEKNAIKEKYSATVKSFGTYSKDFMWLINLPFAYNLPRYKNLSNEQLFYDEEERNETEEQIDRL

SEQ ID NO: 171 - protein, 39 aa, Artificial Sequence
  Motif 1
  SITE (3)..(7): Xaa can be any naturally occurring amino acid
  SITE (9)..(9): Xaa can be any naturally occurring amino acid
  SITE (11)..(33): Xaa can be any naturally occurring amino acid
  SITE (35)..(39): Xaa can be any naturally occurring amino acid
NVXXXXXFXYXXXXXXXXXXXXXXXXXXXXXXXLXXXXX

SEQ ID NO: 172 - protein, 33 aa, Artificial Sequence
  Motif 2
  SITE (2)..(6): Xaa can be any naturally occurring amino acid
  SITE (8)..(10): Xaa can be any naturally occurring amino acid
  SITE (12)..(16): Xaa can be any naturally occurring amino acid
  SITE (18)..(28): Xaa can be any naturally occurring amino acid
  SITE (31)..(33): Xaa can be any naturally occurring amino acid
LXXXXXYXXXKXXXXXNXXXXXXXXXXXRDXXX

SEQ ID NO: 173 - protein, 19 aa, Artificial Sequence
  Motif 3
  SITE (5)..(16): Xaa can be any naturally occurring amino acid
  SITE (18)..(19): Xaa can be any naturally occurring amino acid
KEINXXXXXXXXXXXXIXX

SEQ ID NO: 174 - protein, 18 aa, Artificial Sequence
  Motif 4
  SITE (3)..(3): Xaa can be any naturally occurring amino acid
  SITE (5)..(7): Xaa can be any naturally occurring amino acid
  SITE (9)..(11): Xaa can be any naturally occurring amino acid
  SITE (13)..(17): Xaa can be any naturally occurring amino acid
PFXYXXXRXXXLXXXXXF

SEQ ID NO: 175 - protein, 979 aa, Artificial Sequence
  Metagenomic hit (no protein accession):  contig OJMM01002900 human gut metagenome sequence
MGKHLNAKQRKLEKKLKNQQKDMMYTKSTDAVSVPTLKAAPTKAEMSQDTAEASTLITPGTLKTKAKAMGLKSTLVFDDKIVVTSFLNSKTEENEKCAHIEKIADCNGQTIVERPRMFNTSINAKKVDLSKDNDETNYPNPAFEDCGRDYINVKSALEKRVFGKTYNKDNLHVQIAYNIFDIKKIIGAYINNIIYIFYNLGREEYDAKKDIIGTQDSAYISKILNNTSAYFTYFDGVFKQITDRDSNKDREIKNSYNALVLKVLYYLRQFCMHGNTYTKRNEESFLSDTALYNAKEFFAKADPQINELIDAVYADGIKTINSDFMAHAKNNMYIICEVYKNEAEDSLMKEYYDFVVRKEGNNLGFNTRQLREILIDKYVGNLRGKKYNTFRNKLYTVLGFILVKEIKRNPKIQDSFIAKLRANQNGDEGKLNIYNEFAPKIWSVVSSKLNSAITCFDEESLSKFKGYKDIDESLISRYGITVANTDTLVKILYFLCKFLDGKEINELCCAMINKFDNINDLIKTAAQCGEDIEFVKEYKLFINSNDLSDQIRIVKSISKMKPELSKIGEALILDAIDILGYKINKYKYDAAGNRLVDSNNKPVYSEEYCAFKKDFFETCELDEFGRVKYNKKGKPVINHRRRNFIINNVLSSKWFFYVAKYNRPSECQKFMKSKKLIALVLKDVPETQIARYYQSVTGGRTQANSEAMRMTLIKLLHEFSIKNVLSDVGTMTASENKRQIENSRKERMKAIVKLYLTVVYLIAKSLVKVNTRFSIAFSAYERDVSLLADENELIALANNEDDKWKKGNYVFALTKHFWDNDEPYFDKYNNALQQIRSIVDPNERRLAYRANDKVVKHTHFNLHSYKYVKHNYEEISKASKIITAYRNNVQHLNVMNSITKYLGDISEVTSYYSLYCYTLQRLLLDDNNNDKFASIKGNLRKFGIYNKDFMWLLNIPFAYNLPRYKNLSNEEIFYDELQK

SEQ ID NO: 176 - DNA, 36 bp, Artificial Sequence
  Direct repeat
gtacaatagccctctcgtagttgagggctctgagac

SEQ ID NO: 177 - protein, 1009 aa, Artificial Sequence
  Metagenomic hit (no protein accession):  contig ODAI011611274.1 gut metagenome sequence
MKKKISLKEQRNTKKAENKLKYQKAQAERAAAAQQTAAGAESEENPCFDVVKDTKRKALNPLHVEIEAPSAKKSSVKANGLKSLLLTDGKTVMTSFGRGSEANVEKRFDETGTKTFDRDPELFSAKPLETGYRIQRFNASPKDAGLAYRPAGVRPDQIGAKAALEKRYFGKETPGDNIHVQIAYQIQDIEKLLAVYISNIIYAVNNVTGVSAMKDSKGRPVDLLGDYGILGEEGLTKRLQRIPEQADEEAKALQAFLCSERLSYFGKEFCLVRNSPKQPDKEEKRQYKLMRVLCLLGELRQFLVHGKKKEKEFAWLYRLDRQLSQEYRKLLGEFYDAQVDKVNKSFLTNSTVNLEVLFRALKTGTDPERKTVTQEYYQFTVRKEDGNLGFSLKTLREILLSAYKHEVRDKEYDSIRHKLYQLFSFALYHYYKTGVGAERREAFVAKLRAVMTAEAKQRAYADEAAEIWNDEGSGIRAAFLEILEAVDFGSAVKGIKARSSVAGDKRFAEWLEEVRIRPEGVSCFTKLMYLLTRFLDGKEINELLTGLINKLENIQSFLDVMQQEHAETGLSDAFSFFEYSGEIAAELRMTRSFARMAAADPEAKRFMVVDGAKLLGFNPKDTESEDEGIIRAIYGDACAEYLQFSEEEKEAFYVQEGLYGKEREKFSPYAYFHTDTSLRNFIAKNVVESARFRYVIRYVSPEIARKYARQEALVRFALHRVPLLQLRRYYQSCCGPKKDPDAAECVDFLAGVVNRVDFANFTDVRTGDSSKSEQEKKQKYQAIVGLYLTVVYWIVKNLVNVNSRYVMAFHILERDTVLLEGKRLFVGGMKAEDPFLLTDGYVSRQDAYVRKRIGENKRANRHGLNCVLENRNALGSDPASTDAAASLIWSYRNAAAHLTAVAAAQEYVSELREIHSYFEVYHYAMQRYLKSGAEFAELVSKNGPASGKIAAWANAVDRCHSFCKDWLWLLNVPFAYNPARYKNLSIANLFDKNEAAPVTEDASEQKEDE

SEQ ID NO: 178 - DNA, 36 bp, Artificial Sequence
  Direct repeat
gtactacacccctgcagttttgcaggggtctgaaac

SEQ ID NO: 179 - protein, 961 aa, Artificial Sequence
  Metagenomic hit (no protein accession):  contig OIZX01000427.1
MAKKKKTARQLREEMQQQRKQAIQKQQEQRQEKAAAARETAAPEQPAAAPVPKRQRKSLAKAAGLKSNFILDPQRRTTVMTAFGQGSTAILEKQIVDRAISDLQPVQQFQVEPASAAKYRLKNSRVRFPNVTADDPLYRRKDGGFVPGMDALRRKNVLEQRFFGKSFADNIHIQMIYSILDIHKILAAASGHIVHLLNIVNGSKDRDFIGMLAAHVLYNELNEEAKRSIADFCKSPRLIYYSAAFYETLDNGKSERRSNEDIFNILALMTCLRNFSSHHSIAIKVKDYSAAGLYNLRRLGPDMKKMLDTFYTEAFIQLNQSFQDHNTTNLTCLFDILNISDSARQKQLAEEFYRYVVFKEQKNLGFSVRKLREEMLLLPDAAVIADKRYDTCRSKLYNLMDFLILRVYRTGRADRCDKLPEALRAALTDEEKAVVYHKEALSLWNEMRTLILDGLLPQMTPENLSRLSGQKRKGELSLDDAMLKECLYEPGPVPEDAAPEEANAEYFCRMIYLATLFMDGKEINTLLTTLISKFENIAAFLQTMEQLNIEAELGPEYAMFTRSRAVAEQLRVINSFALMKKPQVNAKQQLYRAAVTLLGTEDPDGVTDEMLCIDPVTGKMLPPNQRHHGDTGLRNFIANNVVESRRFQYLIRYSDPAQLHQLASNKKLVRFVLSSIPDTQINRYYETCGQTRLAGRAAKVEFLTDMIAAIRFDQFRDVNQKERGANTQKERYKAMLGLYQTVLYLAVKNLVNINARYVMAFHCVERDMFLYDGELTDPKGESVSAFLAVNGKKGVQPQYLLLTQLFIRRDYLKRSACEQIQHNMENISDRLLREYRNAVAHLNVIAHLADYSADMREITSYYGLYHYLMQRHLFKRHAWQIRQPERPTEEEQKLIEQEQKQLAWEKALFDKTLQYHSYNKDLVKALNAPFGYNLARYKNLSIEPLFSKEAAPAAEIKATHA

SEQ ID NO: 180 - DNA, 36 bp, Artificial Sequence
  Direct repeat
actatagccctgccggaaatgacagggttctacaac

SEQ ID NO: 181 - protein, 963 aa, Artificial Sequence
  Metagenomic hit (no protein accession):  contig emb|OCVV012889144.1|
MSKNKESYAKGMGLKSALVSGSKVYMTSFEGGNDAKLEKVVENSEIVSLAEKESFSAEIFKKNIGCKIENKKFKHPKRYDVIADNPLYKGSVRQDMLGLKETLEKRYFNSADGTDNVCIQVIHNILDIEKILAEYITNAVYSFDNIAGFGEDIIGMGGFKPIYTYKQFKEPDKYNKKFDDILNNSRLGYYGKAFFEKNDLKHNPNKKKRDKNPYILKYDNECYYIIALLSGLRHWNIHSHAKDDLVSYRWLYNLDSILNREYISTLNYLYDDIADELTESFSKNSSANVNYIAETLNIDPSEFAQQYFRFSIMKEQKNMGFNVSKLREIMLDRKELSDIRDNHRVFDSIRSKLYTMMDFVIYRYYIEEAAKTEAENRNLPENEKKISEKDFFVINLRGSFDENQKEKLYIEEAKRLWEKLKDIMLKIKEFRGEKVKEYKKEVPRIERILPQGKDISAFSKLMYMLSMFLDGKEINDLFTTLINKFDNIQCFLKIMPLIGVNVKFTEDYAFFNKSEKIADELRLIKSFARMGEPVANTKRVMMIDAVKILGTDLSDDELVNMADSFFNDSEGNLLKKGKHGMRNFIINNVIENKRFHYLIRYGDPAHLHEIAKNEAVVRFVLGRIADIQKKQGKDGKNQIDRYYEICVGKDRGKTVSQKLDELTKIIVNMNYDQFEQKKEIIENTRTKTKYMRYDEEQKLRKDNAEREKFKKIISLYLTVLYYVVKNIVNINSRYVIGFHCLERDAQLYSEKYNKEIDKKISSLTKFCLGESDEKKLKALAKKSLEELKTTNSKLYENYIKYSDERKAEEAKRQINRERAKTAMNAHLRNTKWNDIMYGQLKDLADSKSRICSEFRNKAAHLEVARYAHMYINDISEVKSYFRLYHYIMQRRIIDVIENNPKAKYEGKVKVYFEDVKKNKKYNKNLLKLMCVPFGYCIPRFKNLSIEQMFDMNETDNSDKKKEK

SEQ ID NO: 182 - DNA, 36 bp, Artificial Sequence
  Direct repeat
catatacaaccccgtaaagttacggggttctgaaac

SEQ ID NO: 183 - protein, 911 aa, Artificial Sequence
  Metagenomic hit (no protein accession):  contig OCTW011587266.1
MKQNDRENNNKIKKSAAKAVGVKSLARLSDGSTVVSSFGKGAAAELESLITGGEIRKLSDKAILEITDDTQNKNAYNVKSSRIPNLTARTDKLSDKSGMDDLGFKRELELEVFGQCFDDSIHIQIAHAVFDIQKSLAAVIPNVLYTLNNLDRSYSTDNTSDKKDIIGNTLNYQHSYESFNVEKRGEFTEYYNAAKDRFSYFPDILCVLEKVNGKDRYQPKSEKDAFNVLSSVNMLRNSLFHFAPKSNDGKARIAVFKNQFDSDFSHITSTVNKIYSAKIAGVNENFLNNEGNNLYIILKATNWDIKKIVPQLYRFSVLKSDKNMGFNMRKLREFAVESKNIDLSRLNDKFLTNNRKKLYKVIDFIIYYHLNKVLKDSFVDDFVAALRASQSEEEKEKLYAQYSERLFADEGLKSAIKKAVDMISDTKSNIFKMKTPLDKALIENIKVNSDASDFCKLIYVFTRFLDGKEINILLNSLIKKFQDIHSFNTTVKKLSENNLIINADYVDDYSLFEQSGTVARELMLIKSISKMDFGLDNINLSFMYDDALRTLGVSDENLPEVKREYFGKTKNLSAYIRNNVLENRRFKYVIKYIHPSDVQKIACNKAIAGFVLNRMPDTQIKRYYDSLINKGATDIQAQAKALLDCITGISFDAIKDDKHLHKSKEKSPQRSADRERKKAMLTLYYTIVYIFVKQMLHINSLYTIGFFYLERDQRFIYSRAKKENKNPSKNSYLNDFRSVTAYFIPSEIMKRIEKNENKGFLEDFEALWNSCGKTSRLRKEDVLLYARYISPDHALKNYKMILNSYRNKIAHINVIMSAGKYTGGIKRMDSYFSVFQHLVQCDILSNPNNKGKCFESESLKPLLLDMKFDGTDEKLYSKRLTRALNIPFGYNVPRYKNLTFEKIYLKSSINE

SEQ ID NO: 184 - DNA, 36 bp, Artificial Sequence
  Direct repeat
cttatacaacacccattttcacagtgggtctataac

SEQ ID NO: 185 - protein, 904 aa, Artificial Sequence
  Metagenomic hit (no protein accession):  contig   emb|OGNF01009141.1
MADIDKKKSSAKAAGLKSTFVLENNKLLMTSFGNGNKAVIEKIIDEKVDSINEPEVFSVTPCDKKFELQPAKRGLAADSLVDNPLKSKKTAGDDAIHSRKFLERQFFDGNTFNDNIHIQLIYNILDIEKILSVHVNDIVYSVNNILSRGEGMEYNDYIGTLNLKSFETYKNNLVNKKKFDLDRVKKIPQLAYFGSAFYNTPEDTSAKITKTKIKSNEEIYYTFMLLSTARNFSAHYLDRNRAKSSDAEDFDGTSVIMYNLDNEELYKKLYNKKVHMALTGMKKVLDANFNKKVEHLNNSFIKNSAKDFVILCEVLGIKSRDEKTKFVKDYYDFVVRKNYKHLGFSVKELRELLFANHDSNKYIKEFDKISNKKFDSVRSRLNRLADYIIYDYYNKNNAKVSDLVKYLRAAADDEQKKKIYLNESINLVKSGILERIKKILPKLNGKIIGNMQPDSTITASMLHNTGKDWHPISENAHYFTKWIYTLTLFMDGKEINDLVTTLINKFDNIASFIEVLKSQSVCTHFSEERKMFIDSAEICSELSAMNSFARMEAPGASSKRAMFVEAARILGDNRSKEELEEYFDTLFDKSASKKEKGFRNFIRNNVVDSNRFKYLTRYTDTSSVKAFSNNKALVKFAIKDIPQEQILRYYNSCFGASERYYNDGMSDKLVEAIGKINLMQFNGVIQQADRNMLPEEKKKANAQKEKYKSIIRLYLTVCYLFFKNLVYVNSRYYSAFYNLEKDRSLFEINGELKPTGKFDEGHYTGLVKLFIDNGWINPRASAYLTVNLANSDETAIRTFRNTAEHLEALRNADKYLNDLKQFDSYFEIYHYITQRNIKEKCEMLKEQTVKYNNDLLKYHGYSKDFVKALCVPFGYNLPRFKNLSIDALFDKNDKREKLKKGFED

SEQ ID NO: 186 - DNA, 36 bp, Artificial Sequence; identical to SEQ ID NO: 159
  Direct repeat

SEQ ID NO: 187 - protein, 933 aa, Artificial Sequence
  Metagenomic hit (no protein accession):  contig emb|OIEN01002196.1|
MERQKRKMKSKSKMAGVKSVFVIGDELLMTSFGDGDDAVLEKDIDENGVVNDCRNPAAYDAVYGTDSIRVKKTNNNIRAKVNNPLAKSNIRSEESALFRTRVNEYKREQKDKYETLFFGKTFDDNIHIQLISKILDIEKTFSVVIGNIVYAINNLSLEQSIDRPIDIFGDKNTQGISLREDNDYLKTMLPRCEYLFHNILNSDSDNNSKMNYNKVNKGKEEKDNRNNENIEKLKKALEVIKIIRVDSFHGVDGIKGDQKFPRSKYNLAVNYNEEIQKTISEPFNRKVEEVQQDFYRNSCVNIDFLKEIMYGSNYTDRGSDSLECSYFNFAILKQNKNMGFSITSIRECLLDLYELNFESMQNLRPRANSFCDFLIYDYYCKNESERANLVDCLRSAASEEEKKNIYFQTAERVKEKFRNAFNRISRFDASYIKNSREKNLSGGSSLPKYSFIEGFTKRSKKINDNDEKNADLFCNMLYYLAQFLDGKEINIFLTSIHNIFQNIDSFLKVMKEKGMECKFQKDFKMFSHAGHVAKKIEIVISLAKMKKTLDFYNAQALKDAVTILGVSKKHQYLDMNSYLDFYMFDNRSGATGKNAGKDHNLRNFLVSNVIRSRKFNYLSRYSNLAEVKKLAQNPSLVQFVLSRIEPSLICRYYESSQGISSEGITIDEQIKKLTGIIVDMNIDSFENINNGEIGMRYSKATPQSIERRNQMRVCVGLYLNVLYQIEKNLMNVNARYVLAFAFAERDALMLNFTLEECKKNKKRSSGGFSFIEMTQFFIDKKLFKVATEAIKKNVLKYNGNPESLNHIPGEYICKNMEGYHENTVRNFRNMVAHLTAVARVPLYISEVTQIDSYYALYHYCMQMNILQGIEQSGKILDNIKLKNALENARVHRTYSKDAVKYLCLPFAYNISRYKALTIKDLFDWTEYSCKKDE

SEQ ID NO: 188 - DNA, 36 bp, Artificial Sequence
  Direct repeat
gccccttgaccttacgaaatggtaaggttccaaaac

SEQ ID NO: 189 - protein, 1034 aa, Artificial Sequence
  Metagenomic hit (no protein accession):  contig e-k87_11092736
MKRQKTFAKRIGIKSTVAYGQGKYAITTFGKGSKAEIAVRSADPPEETLPTESDATLSIHAKFAKAGRDGREFKCGDVDETRIHTSRSEYESLISNPAESPREDYLGLKGTLERKFFGDEYPKDNLRIQIIYSILDIQKILGLYVEDILHFVDGLQDEPEDLVGLGLGDEKMQKLLSKALPYMGFFGSTDVFKVTKKREERAAADEHNAKVFRALGAIRQKLAHFKWKESLAIFGANANMPIRFFQGATGGRQLWNDVIAPLWKKRIERVRKSFLSNSAKNLWVLYQVFKDDTDEKKKARARQYYHFSVLKEGKNLGFNLTKTREYFLDKFFPIFHSSAPDVKRKVDTFRSKFYAILDFIIYEASVSVANSGQMGKVAPWKGAIDNALVKLREAPDEEAKEKIYNVLAASIRNDSLFLRLKSACDKFGAEQNRPVFPNELRNNRDIRNVRSEWLEATQDVDAAAFVQLIAFLCNFLEGKEINELVTALIKKFEGIQALIDLLRNLEGVDSIRFENEFALFNDDKGNMAGRIARQLRLLASVGKMKPDMTDAKRVLYKSALEILGAPPDEVSDEWLAENILLDKSNNDYQKAKKTVNPFRNYIAKNVITSRSFYYLVRYAKPTAVRKLMSNPKIVRYVLKRLPEKQVASYYSAIWTQSESNSNEMVKLIEMIDRLTTEIAGFSFAVLKDKKDSIVSASRESRAVNLEVERLKKLTTLYMSIAYIAVKSLVKVNARYFIAYSALERDLYFFNEKYGEEFRLHFIPYELNGKTCQFEYLAILKYYLARDEETLKRKCEICEEIKVGCEKHKKNANPPYEYDQEWIDKKKALNSERKACERRLHFSTHWAQYATKRDENMAKHPQKWYDILASHYDELLALQATGWLATQARNDAEHLNPVNEFDVYIEDLRRYPEGTPKNKDYHIGSYFEIYHYIRQRAYLEEVLAKRKEYRDSGSFTDEQLDKLQKILDDIRARGSYDKNLLKLEYLPFAYNLPRYKNLTTEALFDDDSVSGKKRVAEWREREKTREAEREQRRQR

SEQ ID NO: 190 - DNA, 30 bp, Artificial Sequence
  Direct repeat 1
gtgagaagtctccttatggggagatgctac

SEQ ID NO: 191 - DNA, 30 bp, Artificial Sequence
  Direct repeat 2
gtagcatctccccataaggagacttctcac

SEQ ID NO: 192 - DNA, 36 bp, Artificial Sequence
  Direct repeat 3
gctagggcttgtaggaattccttgctatggtacaat

SEQ ID NO: 193 - DNA, 36 bp, Artificial Sequence
  Direct repeat 4
attgtaccatagcaaggaattcctacaagccctagc

SEQ ID NO: 194 - protein, 116 aa, Artificial Sequence
  Gut_metagenome_contig6893000291
MYPFINFAIFRYYNVYHKEADYLVDSLRASMNEVEKDAVYRREAVRIWPRLKKLILNHILPEMTGSKIKEKDAKPDPEMDASMIDSVKIGTESTLFTKIIFLTTLFLNGKETNDLI

SEQ ID NO: 195 - protein, 30 aa, Artificial Sequence
  cas13d direct repeat
  SITE (2)..(10): Xaa can be any naturally occurring amino acid
  SITE (12)..(16): Xaa can be any naturally occurring amino acid
  SITE (18)..(29): Xaa can be any naturally occurring amino acid
LXXXXXXXXXKXXXXXNXXXXXXXXXXXXD

SEQ ID NO: 196 - protein, 18 aa, Artificial Sequence
  cas13d direct repeat
  SITE (1)..(11): Xaa can be any naturally occurring amino acid
  SITE (13)..(13): Xaa can be any naturally occurring amino acid
  SITE (15)..(18): Xaa can be any naturally occurring amino acid
XXXXXXXXXXXFXYXXXX

SEQ ID NO: 197 - protein, 15 aa, Artificial Sequence
  cas13d direct repeat
  SITE (2)..(4): Xaa can be any naturally occurring amino acid
  SITE (6)..(15): Xaa can be any naturally occurring amino acid
YXXXRXXXXXXXXXX

SEQ ID NO: 198 - protein, 940 aa, Artificial Sequence
  Ga0224415_10007274
MIEKKKSYAKGMGLKSTIVSGSKVYMTTFGDGSEARLEKVVENDSIKTLHEGEAFSAEMTDNNAGYKIGNVKFSHPNGYDVVANNPFYTGPVQQDMLGLKEILERRYFGSSTDGNNTICIQIIHNILDIEKILAEYITNAVYATNNIIDPDNDVIGGKKFTSIKTFAQFSASDSSNDFEQFLKNPRLGYLGKAFFYKDGKRNNRQKDPIECYHLLALLCGLRNWVVHNNEEKDLIKYTWLYNLDKYLDAEYITTLNYMYNDIGDELTDSFSKNSAANINYIAETLGIDPKTFAEQYFRFSIMKEQKNLGFNLTKLREVMLDRKDMSEIRENHNDFDSIRAKVYTMMDFVIYRYYIEEAAKVNAANKSLPDNEKSLSEKDIFVISLRGSFNEDQKDRLYYDEAQRLWSKVGKLMLKIKKFRGKDTRKYKNMGTPRIRRLIPEGRDISTFSKLMYALTMFLDGKEINDLLTTLINKFDNIQSFLKVMPLIGVNAKFAEEYSFFNNSEKIADELRLIKSFARMGEPVADARRAMYIDAIRILGTDLSDDELKALADSFSLDENGNKLGKGKHGMRNFIINNVITNKRFHYLIRYGNPVHLHEIAKNEAVVKFVLGRIADIQKKQGQNGKNQIDRYYETCIGKDSSKSVAEKVNALTKIITGMNYDQFDSRRNVIENTGAGNAEREKYKKIISLYLTVIYHILKNIVNINSRYVIGFHCVERDAQLYKEKGYDINLKKLKDKGFTSVTKLCAGIDEECKDVEKEMTERAKASFAALETANPKLYATYINYSDEEKNAELRKQINREKAKTALNAHLRNTKWNVIIREDLLRRDNKACKIFRNKVAHLEAIRYAHLYINDIAEVNSYFQFYHYIMQRRIMAERYDKSSGKVREYFDAVNNEKKYNDRLLKLLCVPFGYCIPRFKNLSIEALFDMNEAVKFDKEKK

SEQ ID NO: 199 - DNA, 36 bp, Artificial Sequence
  DR
caagtaaacccctaccaagtggtcggggtttgaaac

SEQ ID NO: 200 - protein, 1057 aa, Artificial Sequence
  EMG_10003641
MEETKVTKETTIEKQSTKRHKQKSKKTATKMSGLKSALVINNHEMLLTSFGKGNNAIAEKRYILDGDIETINNKNKKFDANNDSKVVVIKGISNPNGQLTNPLFDQSPTAIQPNRTSGNDMIGIRRMLERKYFVHNEENKEFQDNIRIQIAYCILDIEKILMPHINNICFEINNMLRLEGYQEDSFMGSFNLYKPYDAFIATTDDKESSRRDNFAKLMTSKQVRYLGNALYSDSLSNLTKDEILDGKRSKELKKYYQELCLLGMVRQSMIHSNQFNSSIYTLDSSYDSTMNTAELLGKGDDSSLVALATDARVEARAILDEIYKKGVDSINNSFLSNSINDLENLFKIYKCDSSEKKTELIKQYYDFCIRKPQMNMGFSITTIREGMFTRCSEANTLLLCDEGSTVKLNVHDTMKSKFYKNLDFMIYKYYKYENPEKGEKLIEDLRSKIKGKKKEDEDKKQRYAEESACILKAKRDIIKKDLTEAANKDLFADLVKSNKNEKQKFKNEYEELLKPFMIPVKVDYFSELIYLVTRFLSGKEINDLLTQLINKFENIAAFIRMYQNDQGKLEFTANYKMFEIDPQKDIPKDGKRVLSGSAKIAYYLRTINYIARMESFEIKSDKTAINDAISLLGYNSNEHRDEFITYTMAKHVVDKYQNTDYQKIVKDFLSANKTLDCKSKNMQAFVSELKNAHLSENYEQREKEIYELADTNLPAYFSEEDKEKLARYIVHSDGTYKKFLKESFYAIEELPNEGFRNFISNNVINSRRFNYIMRFCNPEKIANIGKNKVLISFALSSLAEKTDMIAKYYRVFCDRIDDQKTMEDYLVNKLTKISYTEFLNVNQKANAEKNKEKDRSQKLIGLYITLLYEIVKNLVNINSRYNIAFQRCDNDSIMILQGQYDERAVQESKLTKKFISNQKLNSYSCRYLTHNISQLDRCNDFIRQYRNKVAHLEVVSNIDEYLSGIKHIESYYALYHYLMQKCLLKNYRIEDHSQNEYKNLNDFSSKLDKHGTYVKDFVKALNVPFGYNLPRYKNLSIDELFDRNKLKTGGTIEMKGE

SEQ ID NO: 201 - DNA, 36 bp, Artificial Sequence
  DR
gaactacacccctgcagaaatgctggggtctgaaac

SEQ ID NO: 202 - protein, 973 aa, Artificial Sequence
  Ga0129306_1000735
MQKQREQQTVTDESERKKKPLKSGAKAAGLKSVFVLSEGKELLTSFGRGNEAVPEKRVTGGTIANARTDNKEAFSAALQNKRFEVFGRTAGSSDDPLAVSRAPGQDLIGAKTALEERYFGRAFADNIHMQVIYAIQDINKILAVHANNIVYTLNNLDREADPETDDFIGSGYLTLKNTFETYCDPAALNEREREKVTVSKQHFDAFMQNPRLAYYGNAFFRKLSKAERLARGREIFDKESPERRQEILGSRGKNKSVDDEIRALAPEWVKREERDVYSELVLMSELRQSCFHGQQKNSARIFRLDNDLGPGVDGARELLDRLYAEKINDLRSFDKTSASSNFRLLFNAYHADNEKKKELAQEFYRFSVLKVSKNTGFSIRTLREKIIEDHAAQYRDKIYDSMRKKLFSTFDFFLWRFYEEREDEAEELRACLRAARSDEEKEQIYAEAAASCWPSVKPFVESVAATLCDVVKGRTKLNKLKLSADESTLVRNAIDGVRISPRASYFTKLIYLMTLFLDGKEINDLLTTLIHAFENIDSFLSVLGSERLERTFDANYRIFADSGVIAQELRAVNSFARMTTEPFNSKLVMFEDAAQLFGMSGGLVEHAEELREYLDNKMLDKTKLRLLPDGKVDTGFRNFIISNVTESRRFRYLVRYCEPRAVRDYMSCRPLIRLTLRDMPDTILRRYYEQSVGAATVDRERILDTLADKLLSLRFTDFENVNQRANAERNREKQKMMGIISLYLNVAYQIVKNLVYVNARYTMAYHCAERDTELLLNAAGEGNLLRRDRSWPARLHLPRRALARRRDRVEVMERDVARGPEAYNRDEWLGLVRTLRREKRVCDNLHNNYAYLCGADAEPGDASLSLLFVYRNKAAHLSVLNKGGRLSGDLKEAKSWFYVYHFLMQRVLEEEFRNTQALPERLRELLMMAERYRGCSKDLIKVLNLTFAYNLPRYKNLSIDGRFDKNHPDPSDE

SEQ ID NO: 203 - DNA, 36 bp, Artificial Sequence
  DR
ccactacacccctgtcgaacaacgggggtctaaaac

SEQ ID NO: 204 - protein, 854 aa, Artificial Sequence
  Ga0129317_1008067
MKKQKKSLVKAAGLKSAFVVGDSVYLTSFGKGNAARLDTKINPDNSTERYVSDSEKHTLKINSITDTELRLSGPFPKQAEAKNPTHKKDNEQKNTRQDMLGLKSTLEKFYFGSTFDDNIHIQIIHNIQDIAKILAAHSNNAGYALDNMLAYQGVEFSDMIGYMGTSRTFDNYDPNHKNNKDFFRFLKLPRLGYFGSAFYSQKGKDFEKRSDEEVYNICALMGQIRQCCFHGKQEKYQLKWLYNFHNFKSNKPFLDTLDKHFDEMIDRINKNFIKNNTPDLIILSGLYPDMAKKELVRLFYDFTTVKEYKNMGFSVKKLREKMLESEEASDFRDKDYDSVRRKLYKLMDFCIYYLYYSDSERNENLVSRLRESLTDENKDIIYSKEAKIVWNELRKKFSTILDNVKGSNIKKLENVKEKFISEDEFDDIKLDIDISYFSKLMYVMCYFLDGKEINDLLTTLVSKFDNIGSIIEAATQIGINIEFIDDFKFFDRSKDISVELNIIRNFARMQAPVPNAKRAMQEDAIRILGGSEEDIFSILDDMTGYDKSGKKLAQSKKGFRNFIINNVVESSRFKYIVRYSNPQKIRKLANNSVVVGFVLGKLPDAQIESYFNSCLPNRVYSTPDKARESLRDMLHNISFNDFADVKQDDRRATPEEKVEKERYKAIIGLYLTVMYHLVKNLVYVNSRYVMAFHCLERDAMHYDVSLDNYRDLIRHLISEGDSSCNHFISHNRRMRDCIEENVKNSEQLIFGKEDAVIRFRNNVAHLSAIRNANEYIGDIREITSYFALYHYLMQRKLIDDCKVNDTAHKYFEQLTKYKTYVMDMVKALCSPFGYNLPRFKNLSIEGKFDMHESK

SEQ ID NO: 205 - DNA, 36 bp, Artificial Sequence
  DR
gaactacactactgtaattttgcagtagtctaaaac

SEQ ID NO: 206 - protein, 965 aa, Artificial Sequence
  Ga0224415_10048792
MSKKENRKSYVKGLGLKSTLVSDSKVYLTTFADGSNAKLEKCVENNKIICISNDKEAFAASIANKNVGYKIKNDEKFRHPKGYDIISNNPLLHNNSVQQDMLGLKNVLEKRYFGKSSGGDNNLCIQIIHNIIDIEKILSEYIPNVVYAFNNIAGFKDEHNNIIDIIGTQTYNSSYTYADFSKDKSDKKYIEFQKLLKNKRLGYWGKAFFTGQGNNAKVRQENQCFHIIALLISLRNWATHSNELDKHTKRTWLYKLDDTNILNAEYVKTLNYLYDTIADELTKSFSKNGAVNVNYLAKKYNIKDDLPGFSEQYFRFSIMKEQKNLGFNISKLRENMLDFKDMSVIRDDHNRYDKDRSKIYTMMDFVIYRYYIDNNNDSIDFINKLRSSIDEKSKEKLYNEEANRLWNKLKEYMLYIKEFNGKLASRTPDRDGNISEFVESLPKIHRLLPRGQKISNFSKLMYLLTMFLDGKEINDLLTTLINKFENIQGFLDIMPEINVNAKFEPEYVFFNKSHEIAGELKLIKGFAQMGEPAATLKLEMTADAIKILGTEKEDAELIKLAESLFKDENGKLLGNKQHGMRNFIGNNVIKSKRFHYLIRYGDPAHLHKIATNKNVVRFVLGRIADMQKKQGQKGKNQIDRYYEVCVGNKDIKKTIEEKIDALTDIIVNMNYDQFEKKKAVIENQNRGKTFEEKNKYKRDNAEREKFKKIISLYLTVIYHILKNIVNVNSRYILGFHCLERDKQLYIEKYNKDKLDGFVALTKFCLGDEERFEDLKAKAQASIQALETANPKLYAKYMNYSDEEKKEEFKKQLNRERVKNARNAYLKNIKNYIMIRLQLRDQTDSSGYLCGEFRDKVAHLEVARHAHEYIGNIKEVNSYFQLYHYIMQCRLYDVLKNNTKAEAMVKGKAKEYFEALEKEGTYNDKLLKIACVPFGYCIPRYKNLSMEELFDMNEEKKFKKKAPENT

SEQ ID NO: 207 - DNA, 36 bp, Artificial Sequence
  DR
caagtaaacccctaccaaatgtaaggggtttgaaac

SEQ ID NO: 208 - protein, 1022 aa, Artificial Sequence
  160582958 _gene49834
MKNSVTFKLIQAQENKEAARKKAKDIAEQARIAKRNGVVKKEENRINRIQIEIQTQKKSNTQNAYHLKSLAKAAGVKSVFAIGNDLLMTGFGPGNDATIEKRVFQNRAIETLSSPEQYSAEFQNKQFKIKGNIKVLNHSTQKMEEIQTELQDNYNRPHFDLLGCKNVLEQKYFGRTFSDNIHVQIAYNIMDIEKLLTPYINNIIYTLNELMRDNSKDDFFGCDSHFSVAYLYDELKAGYSDRLKTKPNLSKNIDRIWNNFCNYMNSDSGNTEARLAYFGELFYKPKETGDAKSDYKTHLSNNQKEEWELKSDKEVYNIFAILCDLRHFCTHGESITPSGKPFPYNLEKNLFPEAKQVLNSLFEEKAESLGAEAFGKTAGKTDVSILLKVFEKEQASQKEQQALLKEYYDFKVQKTYKNMGFSIKKLREAIMEIPDAAKFKDDLYSSLRHKLYGLFDFILVKHFLDTSDSENLQNNDIFRQLRACRCEEEKDQVYRSIAVKVWEKVKKKELNMFKQVVVIPSLSKDELKQMEMTKNTELLSSIETISTQASLFSEMIFMMTYLLDGKEINLLCTSLIEKFENIASFNEVLKSPQIGYETKYTEGYAFFKNADKTAKELRQVNNMARMTKPLGGVNTKCVMYNEAAKILGAKPMSKAELESVFNLDNHDYTYSPSGKKIPNKNFRNFIINNVITSRRFLYLIRYGNPEKIRKIAINPSIISFVLKQIPDEQIKRYYPPCIGKRTDDVTLMRDELGKMLQSVNFEQFSRVNNKQNAKQNPNGEKARLQACVRLYLTVPYLFIKNMVNINARYVLAFHCLERDHALCFNSRKLNDDSYNEMANKFQMVRKAKKEQYEKEYKCKKQETGTAHTKKIEKLNQQIAYIDKDIKNMHSYTCRNYRNLVAHLNVVSKLQNYVSELPNDYQITSYFSFYHYCMQLGLMEKVSSKNIPLVESLKNEANDAQSYSAKKTLEYFDLIEKNRTYCKDFLKALNAPFSYNLPRFKNLSIEALFDKNIVYEQADLKKE

SEQ ID NO: 209 - DNA, 36 bp, Artificial Sequence
  DR
gaactacacccctctgttcttgtaggggtctaacac

SEQ ID NO: 210 - protein, 998 aa, Artificial Sequence
  250twins_35838_GL0110300
MGNKQRVSAQKRRENAKLCNQQKARQAESQRDKIKNMNVEKMKNINTNDIKHTKTTAKKLGLKSTIIADKKIILTSFINEQSSKTANIEKVAGFKGDTIDTISYTPRMFRSEINPGEIVISKGDDLSEFANPANFPIGRDYVKIRSALEKQYFGKEFPEDNLHVQIAYNVADIKKILSVYINNIIYMFYNLARSEEYDIFYNSQSENSGRDCDVIGSLYYQASYRNQDANRFEKDGKKKAIDSLLDDTRAYYTYFDGLFSVPKREDDGKIKESEKEKAKDQNFDVLRLLSVGRQLTFHSDKSNNEAYLFDLSKLTRAAQDENRRQDIQSLLNILNSTCRSNLEGVNGDFVKHAKNNLYVLNQLYPSLKANDLIGEYYNFIVKKENRNIGIRLITVRELIIEHNYTNLKDSKYDTYRNKIYTVLNFILFREIQENSIAIKNFREKLRSTEKAEQPALYQAFANKIYPMVQAKFAKAIDLFEEQYKTKFKSEFKGGISIENMQQQNILLQTENIDYFSKYVLFLTKFLDGKEINELLCALINKFDNIADLLDISKQIGTPVVFCADYESLNDAAKIAENIRLIKNIAHLRPAIQEAQSSKDNADAAGTPATLLIDAYNMLNTDIQLVYGEAAYEELRKDLFERKNGTKYNKKGKKVDVYDHKFRNFLINNVIKSKWFFYIAKYVKPADCAKMMSNKKMIEFALRDLPETQIKRYYYTITGNEALGDAESLKGVIIEQLHAFSIKNTLLSIKNMGEGEYKIQQIGSSKEKLKAIVNLYLTVAYLLTKSLVKVNIRFSIAFGCLERDLVLQKKSEKKFDAIINEILLEDDKIRKECDKERAQAKTLPRELAQERFAQIKRRESGCYFKSYHVYDYLSKNSNEFKQNHIDFAVTSYRNNVEHLNVVHCMTKYFSEVKDVKSYYGVYCYIMQRMLCDELIIKNQDKPDVRQTFEEYNRLLKDHGTYSKNLMWLLNFPFAYNLARYKNLSNEDLFNAKNNDQKSK

SEQ ID NO: 211 - DNA, 36 bp, Artificial Sequence
  DR
gtacaatagcccgttgaaatagatgggttctaagac

SEQ ID NO: 212 - protein, 1020 aa, Artificial Sequence
  250twins_36050_GL0158985
MKKKHQSAAEKRQVKKLKNQEKAQKYASEPSPLQSDTAGVECSQKKTVVSHIASSKTLAKAMGLKSTLVMGDKLVITSFAASKAVGGAGYKSANIEKITDLQGRVIEEHERMFSADVGEKNIELSKNDCHTNVNNPVVTNIGKDYIGLKSRLEQEFFGKTFENDNLHVQLAYNILDIKKILGTYVNNIIYIFYNLNRAGTGRDERMYDDLIGTLYAYKPMEAQQTYLLKGDKDMRRFEEVKQLLQNTSAYYVYYGTLFEKVKAKSKKEQRAKEAEIDACTAHNYDVLRLLSLMRQLCMHSVAGTAFKLAESALFNIEDVLSADLKEILDEAFSGAVNKLNDGFVQHSGNNLYVLQQLYPNETIERIAEKYYRLTVRKEDLNMGVNIKKLRELIVGQYFPEVLDKEYDLSKNGDSVVTYRSKIYTVMNYILLYYLEDHDSSRESMVEALRQNREGDEGKEEIYRQFAKKVWNGVSGLFGVCLNLFKTEKRNKFRSKVALPDVSGAAYMLSSENIDYFVKMLFFVCKFLDGKEINELLCALINKFDNIADILDAAAQCGSSVWFVDSYRFFERSRRISAQIRIVKNIASKDFKKSKKDSDESYPEQLYLDALALLGDVISKYKQNRDGSVVIDDQGNAVLTEQYKRFRYEFFEEIKRDESGGIKYKKSGKPEYNHQRRNFILNNVLKSKWFFYVVKYNRPSSCRELMKNKEILRFVLRDIPDSQVRRYFKAVQGEEAYASAEAMRTRLVDALSQFSVTACLDEVGGMTDKEFASQRAVDSKEKLRAIIRLYLTVAYLITKSMVKVNTRFSIAFSVLERDYYLLIDGKKKSSDYTGEDMLALTRKFVGEDAGLYREWKEKNAEAKDKYFDKAERKKVLRQNDKMIRKMHFTPHSLNYVQKNLESVQSNGLAAVIKEYRNAVAHLNIINRLDEYIGSARADSYYSLYCYCLQMYLSKNFSVGYLINVQKQLEEHHTYMKDLMWLLNIPFAYNLARYKNLSNEKLFYDEEAAAEKADKAENERGE

SEQ ID NO: 213 - DNA, 36 bp, Artificial Sequence
  DR
gtacaatagccctgcagtaaggcagggttctaagac

SEQ ID NO: 214 - protein, 903 aa, Artificial Sequence
  31009_GL0034153
MGSRGVIIMTEKRKSRAKALGVKSAFLKDDDVIMTSFGRGNDAVVEKIIKNNEVQNINIDKPVYDVVGVEKETGIINVVGTKRGINTINKKKQYANTQVSQKRMGMDLIQRKDKLEKVFFNENFNDNIHIQLIYNILDIEKILSVYVNNIVYALGNLERDNSDDEKDLIGYASTLNSYEDFINKNLVKQNENIDKFIENGNRLGYFGNVFYKNKNELKDKKDIFDMLCLLGSLRQFCFHFKGAKFEGVEQISNSWLYNLSQLHNEFKSTLDSFYNEKIEDINGNFIEKNKVNIQILCNDLKLDKNKLVQDYYNFLISKNHKNMGFSIKKIREYILDIDYASYIKEQGYDSVRSKLFTLIDFIIYDLYVNKEKDRIDDIVSKLRGAIYDYKKDDIYKAEADWVWKKLNRQIKALTKLLSNRRIFSQDNDITNWNGVEFEKIGEQKLEDNADYFCKLMYFVTLFLDGKEINDLLTTLINKFDNIRSFIEVMEEMSLKCEFMEEYKFFNESKDICLRLKEIHSFARMKRPLDNKNVEKEMYKDAISILMKDSSIENSNIDVIFNTYIYQKDNKNAKKDFRNFIIKNVIKSNRFIYLIKYSNPTNVRKFASNTNVIKFVLGTLPDKQLERYYKSCGLSDGIGKTEWVRELSEIITGIDYSDFLNVKQRAKSKEEKEDKAKKQAIVTLYLTILYILTKNLVNVNSRYVIAVHCIERDSELYKTELYEKLKPEQPEKLYKIKPDKPLQPAQYFLFTKYLLQNDFFGEYTSKKNQYIQKNMKIYSKINKNFNVFVRYRNNIAHLNSIKNATKYVNDIGTFTSYFQLYHYIMQCDLKDWVKKEVEEKKISDKYYNYLEKYYKNNNIYLKDFVKAINVPFAYNYSRFKNLSIDKLFDKNDPRKKKWIVIFNF

SEQ ID NO: 215 - DNA, 36 bp, Artificial Sequence
  DR
gaactacacccttgttaaataacatgggtctaaaac

SEQ ID NO: 216 - protein, 951 aa, Artificial Sequence
  530373_GL0023589
MKTEMKNGEVKTSAKKENCSIAKANGLKSTFKLAENTYYMTSFGKNNTADPEKNIVRMNVENIRNTFSATPISERIVDITGETKKTAQVVLPACSDNQLHAKDTIEQMYFGKTYTDNIHIQIAYNIMDMKKIFGVYSNNIIYSINNLLEEREGSDFLGVFYTENSYQAMNFADAIIKSKLLTKNSKYLNLDMNNVWFNKEVSELSSFRKYVYSRSYANKTSTAKKICICLQEDFHFFDYATVKKAADQFTLLKRIQRSNYFFDMLCDSAGNYQCKNAQILLSILGNLRQESFHENRSTSAWMFNLEKVLTPERKKLLTALIDSRTNHINNHFIENSNKNLNAIFRLFPEKSQADLIVEYYDFSVRKAYKNLGFSVKLLREMLLKTQQELSPLNDKAYDSIRSKLYTMFDFVLYKLYVDNEEQIDQFVRKLRASTSNVEKEALYQQESERTWNEIRGQIIDNVIPFIDSIQKQENEDKLTKRIDQSIIDKAVPHFVNSRDLSYFAKVVYVVASFLDSKEINMFFDALINELENIASFNDVLEQLDMPLDYQEKYRFFERSREEAAGLRFIKSIAKMNKTRVAVKNDTKTVKLKQYCDAGAVLGEINAEKIKAAFGLGDKFNTEEARVDHTFRNFIINNVINSNRFNYVMRFMNPKSARRIMQCESLVAFSLKDIPDTQIERYCKSVNIPFDSANPNYAHMKEQLTYKLLQVQFCNFSKVSNSSHQAVEKERLKALVGLYLSVLYRIVKSIVRINTSYTIAFAAYERDCVILNRKMGKNLYGLKTDPMGITNDFMHMPTVAPSNPHNDFINETKLSKRVCALVNKNRTLCTNRTYQVYRNIIMHLNAVSAFPQYLEGLKVVHSYFDLYHYTVMMLLHRQNEKEKKRNEKEKKQNEKENNMILSTAALEKYDMVRKYQSANKDFIYAINSPLAYNAARYINLSCRTKFEEGFGK

SEQ ID NO: 217 - DNA, 36 bp, Artificial Sequence
  DR
acttaaatccccctgtaaatgcgggggttctaaaac

SEQ ID NO: 218 - protein, 928 aa, Artificial Sequence
  BMZ-11B_GL0037771
MSKDKKTKAKRMGVKALLAHGEDKLTMTTFGKGNRSKIEFTEGYHGRALETPKHFGKRGFEVRKIDENVDLYGDLEEGKTIEALLINPSEKVGEDYLKLKGTLEKRFFGREFPHDNIRIQLIYNILDIYKILGMNVADILYALGNMQDTELDIDMFGQSLNNPEKAKDVVQRMKPYMGFFGGIFRTQKKEDRKKDSNLSEEEKEEKKKKQEELLQKDLQHNMDVARCISALRHATAHNKPATAHDKQDEYPWFKSSDIYETKIFKAGMWSVIEADYKKKIQDVNKQFFSKNKVNLAILFDLLDVRDVKQKKRISDEFYRFTIRKDGKNLGMNLVKIREIIIDRYASGLRDKKHDPHRQKINVIADFLIFRALSQNQGIIDKTVSSLRLTKDEEEKDHVYQNAAELVWGMVSNCLTPYFNDPKNKYILKYKDAKTPGDFEDWITSKISEDDGEPFVKVLSFLCNFLEGKEINELLTAYIHKFECIQDFLNVISSLGENVQFQPRFALFNNASFAQNVAVQLRILASIGKMKPDLTEAKRPLYKAAIRMLCPPEKWEKYTSDEWLEKNMLLNSEDRKNDKKKKQVNPFRNFIAGNVIESRRFMYLVRYSKPKAVRAIMQNRSIVNYVLHRLPSEQIKTYSRVFPEDFSDTEAEIDFLVNKLSEFSFETFISNQQTILNNSKRGFSPNRRETAEEIERLKAITGLYLSVAYIAIKNIVKANARYYIAFAVFERDKELVKAKDARIQTTIPNTKFTNYFCLTQYYLDRDEEKKFPGDPRDKEAFFEHLRKTKRHFSKQWREWLNEKIADAKSSQATGLLLREARNDVEHLNVLRAIPDYIQDFRHGEKGETAMNSYFELYHYLMQRLMLKNTELDLSHWSGWIMRSGRPDRDLIQIAFVSLAYNLPRYRNLTKEHHFDDTVLQKIREKESLD

SEQ ID NO: 219 - DNA, 36 bp, Artificial Sequence
  DR
ggtcaacagtgtggggaattacccgcactctacaac

SEQ ID NO: 220 - protein, 940 aa, Artificial Sequence
  BMZ-11B_GL0037915
MAEHSKKTAAKRVGIKSVIAHDGGKLAVTTFGKKSAAKLAYRDGDQTPFDEEKKSELGGFNVTGVDENTVDAERGIPGEGLIEASVANPVNDLIDESRKEYGQDYLMLKDQLEKVFFGQTFPGDNLRIQIIYNILDMQKAFGLYVNDVLYAVNNLQNTGRLLTDDDWTSDVIGLALGKGRGKEIIESMSDALGFFGSAFKPIPKKPGDKTSGKYAGGKLKERDAAIAEDVAVLRVLCGLRQISAHFRSEKKGESLWASDLGVEKYFKNEMSVVDANYKARAKKIDANFMATSRANLVLLFRILNAKTKEEKEKIAVDYYKFAIRKEGKNLGVNLKKAREILLDKHYPDAKNKQFDSYRGKLYTITDFIIYRMAAEDGAFLEESVQKLRSTPSEEEKEKVYDVLAETIWNATKDDVKKVFDIRQQDIKNAAAQSLDDVNLDSVTVEKEKEFPVVKLLAFLCNFLDGKEINELLSTFVNRLENVQALIDLAKNLGETVNFSKNYAVFNDCGSGAAGRIAERLRLLASIGKMDAGLDSLKPLFIRFAIQILGGARISDEDVDAYIKENILVRKDDPEKKRSNTFRNFITNNVIKSRRFVYLVRYTKADAVRAVMKNGKIVRYVLARIPETQVDSYYKSVVDSSDAGNGKPIKEKIKALAEKLGEFSFDLIAENRDGIIDNAKLDEEKKNVEIERLKAVTGLYLTVAFIAIKNLVKANARYYIAYSAFERDSELLKEKLGEEEFYKLCIEFKNKKGETGYNNAFALLKYYIDRDEDIWRKEEATHRGRDENGKLDYDPDPRRKHYPKRRWLNILKDNLAEMERIDPTGMLAAQMRNDAMHLNAMFKIAKFVGDFRKGSSHEMRSYFELFHFLEQKTLLDSKEDFVQGMRESYGDRIRVEPCVDLIKYLYITLGYSLPRYKTMTVSGLFDPDSEDAKERAKGKRA

SEQ ID NO: 221 - DNA, 36 bp, Artificial Sequence; identical to SEQ ID NO: 219
  DR

SEQ ID NO: 222 - protein, 923 aa, Artificial Sequence
  BMZ-11B_GL0069617
MPHNKKSTIKRIGVKSAFSHGNSRLTITQFGRGNTADIAVETDSRGRSLSLPHRVEKSFTVNKIDDEIDVQRSSLLGTLLNPAENDPVDYLGLKSTLEKEFFGQEFPNDSIRIQIIHNILDIQKILGIYINDVLYSIANLQNVETVEDCLGQSLSKGQDEKLKKILNSITPYLGFLGAGFKQSERPKHQKNSRPDPRQKIEDPNWAYNKSALRILSTLRNKLAHFEDSSILFCDNLKGQFLGSNGNWITIETHYDEMITRINESFFNNSRMNLKILYLVLNAATLEDKKKITEEYYRFSILKEGKNLGVNMRKLREMMVDMFYSEIKDKQYDSYRQKIYTILDFLLFREIKDSEELETMVADLRESESDEKKEELYHDYAELFWDGVKDLIVPFFAAFDGDFTVFTTEKVPADTSKEPFLSSANTEPLVKLLAFLCNFWDGKEVNEVLSAYIHKFESIQAFIDVLESKELNEKVVFSAKKGRNFSAFNEHGFAGRVADQLRVLASIGKMKPDLEGAKRALFRDAVETLGIVENSNWLNEDGTISNDWLETYVLPGDKVTEEEKRAIKPFRNFIANNVIESRRFMYLARYAKPKSVRELMKHEEIIRYVLTRLPEKQIDTYFSNISEGDESEISRKIDTLTKALTGFSFNSLFINRDKIVENTKLDTSNKNVKIERLKALTGLYLTVAFVAVKNLVKANARYFIAFSAFERDYGFMKSHDPDVAQSCLAYEEIMDGKSKTKYNEIYALTEYYLKKEEENDYHPEPGQPFDKEACRKHLDSIRRHFTKKWRDIFRKEIDEAVKIHFTGYLGVWARNQSAHLNVLTQALPQFIGQFARNSKTGKTARMTSYFQLYHYLLQRLLCEDLNFDVPEEWKNKIQETGLPCNDLIHICFVPLGYNLPRYKNLTIECLFDEDSVSAKEGKKA

SEQ ID NO: 223 - DNA, 36 bp, Artificial Sequence
  DR
atacagcagccctacagattcgtagggttctgtgac

SEQ ID NO: 224 - protein, 993 aa, Artificial Sequence
  DLF014_GL0011914
MAKKKNAKQRREEEKNRLKAKIEKFKIKYAEQETVDKITEEIAQSDKIMRTESILVQHTKKSLAKASGVKSVFIKDDEVIMTSFGRGNDAVVEKIIKDNNVDEKNTKPAYEIVDIEKNGDLIKVQSRRCKNIESANTELPPEKIGMDLIRCKDKLEEIYFGRTFNDNIHIQLIYNILDIEKILSVYINNAVYALGNLERKENDKEKDLVGYLSARAGYNKVINKAINDEKIKDRIEDLKEFIENGNRLGYFGDIFFKKEEVSKNGKKPKKVEVLKSEKEIFDILALLGSLRQFCFHYDEAVFENEDGVIDKEYNDNSWLYNLEKLEPEFKDTLDYFYNRKINDINKGFIKTNQINLHIICDELGLNWDKEQVVGDYYDFLIAKKYKNIGFSIKKIREHMFDIYEAFDIKDKRFDSVRSIMYKIIDFVIYYSFIHYKQDEVDEIVNYLRSTLSEEQKKEKYIKLAGNIWAEYKTQFNKLKDILLANIKEFSDAKEDDVYYEEFKNFKFNEVGKEKLGENAEYFCKLMYLLTLFLDGKEINDLLTTLINKFDNIRSFVELMKEENIECIFDKKFAFFDESKNVCSTLREINSFARMQKPLNNVSVKREMYKDAIKILLKDTRAEEQNIDRILNEYIPSKEDKGIKKDFRNFIIKNIIKSNRFMYLVKYSNPTDVRNLASNRNVVKFVLNAIPDTQIDRYYKSCIQHYSNEVDKETQIQELTDIITGIDYLDFLDVRQSYRNEDKSKKQAVVTLYLTILYILTKNLVNVNSRYVIALHCLERDSKLYGYTKLSKKNNKKLEKIKPPKYHELTKYFIDNRYFDRKKKNKKYGEYTSKKISTYIETNMKNFIGCEQFRTPERYRDTQIDMFVKYRNSIAHLNAVRKASKYINDIRGFDTYFELYHYIMQRDLKDILEKIAEGAAKETEEGQKQDELLKTYFDNLDKYGTYVKDFVKALNIPFAYNYPRYKNLSIDELFDKNNTRKTIKIQDKKLEERT

SEQ ID NO: 225 - DNA, 36 bp, Artificial Sequence
  DR
gaactactacctcacagatttgtggggttcagaaac

SEQ ID NO: 226 - protein, 924 aa, Artificial Sequence
  EYZ-362B_GL0088915
MKKKLNIREQREAKKAAAKQIYAAKASAAQKKADETVVAAQPAGDTANSKPIKSRNKAAGLKSTFVVGDSLYMTSFGKGNLSVPEYRVDTGDAYRVDPISEHSELHVLGADDLAVSFSGTRRMKDVSELKADNPLHSGKNNLVPKNGTDILGLKGILEQRYYGRNFDDNVHIQIIYNILDIEKNLAIYVTNVVAALDHMCDETLDTEHEDFIGYMNTMNSFDVFMHPSQSSRADIYKKINDSRRRFENLLRTKRLGYFGFAYNPKDRNQKKRLYYLMSMIGQLRQFAFHKDSPFNRVWLYQLDEKLSKEHKDTLNYFFDQRYDEIHENFNKTNKVNLELLAEAFPSEDYATLANQYYDFTVFKAHKNLGFSIKKLREKLIENALRDEKIDSFRSKLYRLIDFCLFRIYLKDPDRAEKNVRFLRSCINEQEKEQFYTQEANALKSENPGLVNDFCMQLKDRYSSGSNSTENAEKKEDFPVFPHCHDKQKVSNVSLFAKLMYAFCLFLDGKEINELLSALLNKFDTIACMTKCTKDLGIYAPFSKDFNFFEDSEQRAEEMNLVKSIARMTKPDIQAKEQLFRDALDILGVEVGVSEEALQKEIHQYFQKGAKHDFRNFIINNVINSTRFIYVIKFCNPKTAGQIIRNENILRFVLQRMPQEQIERYYHACTKNPSLCTHDEKIQCLSNIIMEVRYKKFCNVAQKSRDTTKQMEKERFKAIIRLYLTAIYLVVKNLVNVNARYVLAFHCLERDADLFGLQIKQTLPDRKKKSDYLKLAVDQCGDNPENKPKGYLARNKRLCQCVREDIDNAKHLNGDITDYRNCVAHLNVVRNCDQYLENIDTVHSYFSLYQYLVQHYLLKRFEKDKYRCKDDLAIHYYSQVKQYRSYVKDLVKALNAPFGYNIPRFKNLTVEQLFDRNADPETITA

SEQ ID NO: 227 - DNA, 36 bp, Artificial Sequence
  DR1
gaactatagtagtgtgaatttacactactctaaaac

SEQ ID NO: 228 - DNA, 36 bp, Artificial Sequence; identical to SEQ ID NO: 130
  DR2

SEQ ID NO: 229 - protein, 1054 aa, Artificial Sequence
  Ga0099364_10024192
MSQSTKTKAKRMGVKSVLAHGKDEKGHIKLAITAFGKGNKAELAIQTDEKGSNLAKTYKERNITANKIVSEGIQTSGTIAGEGHATFLNNPAEHVGTDYLKLKETLEMEFFGKSFPGDSVRIQIIHQILDIQKLLGIYITDIIYCINNLRDETHLDHESDIVGLSMSNTNVNLALNQMRPYFGFFGEAFRPVGDDKVKEITLSDEVRKNIEKIIALEEQKRNPSTPRFKQENINLEIENAMGKFKSKDAFETAKKKYNRIVADETNAKTLRILGAMRQITAHFKDQATLFMSDVELPKILKKEFSKADWQTVEDYYAKLVDRINEGFCKNAATNVHFLTELLPEESKKQLTEDYFRFAILKEGKNLGVNMKRLREVMFALFVPELTAPETKKRYDSYRAKIYGLTDFLLFKHIHNTKQLEEWVAVLRETSNEDAKENLYDEFARTAWNTVGDSAKQLIENMQSYFTKKEKEITKTAQPVLSTSSIAHTSKKITQFSSFAKLLAFLCNFWEGKEINELLSAYIHKFENIQEFINLLEKLEGKKPQFTENYALFNEAAGQRAGEIAQNLRILASIGKMKPDLGDAKRQLYKAAIEMLGIDTEEYISDEWLEPNMLLAQPPKEPKKDNEKYRKEPHKYSYEKDMETYRKKLREYEETWRSLIDYEYLMPETNPFRNFVAKQVIESRRFMYLVRYTKPKTVRALMSNRAIVHYVLSRIADIQDHHMTESQIDRYYQNLPQYNEQQHKNVSLETKIDALADYLCKYTFEKNVLKQKNGIVLNTKSATKNVEIEHLKALTGLYLTVAYIAVKNLVKANARYYIAFSIFERDYALFEKKLGKDTLEKYVKPFKYIDKGEEKEGKNNFFALTEYLLDKDNSLRYQWNNDLSDEENKQALRKHLDKKEIRSQRHFSQYWLDIFARQIENAKKTSESGYLLTAARNCALHLNVLTALPEFVGEFRKTGDKMTSYFELYHFLLQKLMLAEAGLNLDEYRERIDTYQTACKDLINITYVSLGYNLPRYKNLTCEPLFDEESATGKERQTRLDEKSKEKKQRKGGQK

SEQ ID NO: 230 - DNA, 36 bp, Artificial Sequence
  DR
gtgcagtagccttacagattcgtagggttctgagac

SEQ ID NO: 231 - protein, 971 aa, Artificial Sequence
  Ga0187910_10006931
MIEKKKSYAKGMGLKSTLVSDSKVYMTSFGNGNDARLEKVVENNAISCLVDKKEAFVAEITDKNAGYKIINKKFGHPKGYDVVANNPLYTGPVQQDMLGLKETLEKRYFGSSVSGNDNICIQVIHNILDIEKILAEYITNAAYAVNNIAGLDKDIIGFGKFSTVYTFDEFAEPDRHKERFIKDGKLDTKLINQLKNQYDEFDAFLDDTRFGYFGKAFFCKEGDKYLNKQDNERYHILALLSGLRNWVVHNNEVESKIDRKWLYNLDKNLDKEYITTLDYMYSDIADELTKSFSKNSAANVNYIAEILNIDSKTFAEQYFRFSIMKEQKNLGFTLTKLRECMLDREELSDIRDNHKVFDSIRSKLYTMMDFVIYRYYIEEAKKIENENKTLSDDKKKLSEKDIFIISLRGSFSEEQKDKLYSDEAERLWAKLGKLMLEIKKFRGQMTRDYKKSDTPTLNRILPESEDVSTFSKLMYALTMFLDGKEINELLTTLINKFDNIQSMLKIMPLIGVNAKFSSDYAFFNNSEKIADELKLIKSFARMGEPVANAKRDMMIDAIKILGTDLDDNEIKKLADSFFKDSNGKLLHKGKHGMRNFIINNVVNNKRFHYIIRYGDPAHLHEIAKNEVVVRFVLGRIADIQKKQGKGGKNQIDRYYEICIGNGYGKSVSEKIDALTKVIINMNYDQFEAKRKVIENTGRDNAEREKYKKIISLYLTVIYQILKNLVNVNSRYVIGFHCVERDAQLYKEKGYDINTNNLESKGFTSVTKLCVGIADDDPVKYKNVEIELKERALASFDALEKENPELYEKYNMYSEKQKEAELEKQINREKAKTALNAHLRNTKWNVIIRENIRNTEKDACKQFRNKADHLEVARYAYKYINDISEVNSYFQLYHYIMQRIIIDSSGNNANGMIKKYYESVISDKKYNDRLLKLLCVPFGYCIPRFKNLSIEALFDKNEAAKYDKIKKKVAVR

SEQ ID NO: 232 - DNA, 36 bp, Artificial Sequence
  DR
catgtaaacccctaacaaatggtaggggtttgaaac

SEQ ID NO: 233 - protein, 1105 aa, Artificial Sequence
  Ga0187910_10015336
MENVKNPKEIVKGAKVRFEIYENPKPKKQNQRFSAINVEVITDETHKEAKIQKNEFKTFDQFTKELQETQKVNGETKKEHITKNKHTNVKAAGVKSVFAVDDGNVLITSFGRGNAADIETLKSDDDKTINLTETENQKKYVVTNKRSNVKGLADNPTKVESIIPGETQIGFKSILEKHFFGRTFNDNIHIQIIHNILDIKKILAVHTNNIVYALDNIHERGRENSAEKPIDMIGAGGISTSKEYEQYCSEKSDYEDNFLKQLINNERIAYFGNAFFKDEGNKKVMRTEKEIYYILGMLNEVRNVSTHFTEEDNRDWAKANLYNLSNRLKVGSKEVLNQLYKEKIDKIDANGFVNKGCKRDFSILFKSLNLTTDKDKGELVVGFYDFSIRKNYKNIGFSIKTLREYMLKISNSTLCADTISNNAIRPKAYKLYDFIIWHYYMNKPDKINDFVEKLRTQNKNDEKIKLYYDEAVCLLSELGREIHTMTSCVHNIENTSYEITDKKQKEYYKMQINSLNSADKVSDFSKVIYLVTLFLDGKEINDLLTTLINKFDNIASLLSVLEKQSGKKVEFVENYSFFNSSNLLKEKTLNKSENYTCKIVEELREINSFARMTGDCKIRKSAFEDASQLLGYHDKTVNNLFEVLRLKELESKDWKKRTDDEQQEYDRLLNKHHYFKSGKKLPDTGLRNFIINNVIESRRFNYIVRYADPKKIRKCTENNELLKFAFKDVPDSQVDRYYNICVTNKITNATREEKIERLVDIIKSMNLSKVATVKQRDKQDNVEKQKQLAIMSLYLNILYQIAKNLVYVNSRYVMAFHSLERDSQMLFDAYYDVKRGYCDLSTVLLFGVDDLQNRNRGSYKYLRDNRRSNKDVIETFGDFKGKVSKVVEKKNQGLTNEIYDSLCNVAGTTKTEVQNEIKSILKSNGLDESASSYLSHKLVNKVHSYKYLKQNLDCADNTMINQFRNNVAHLNTIRNMDGIENVTGITSYFQIYHYLMQKALYKEFKKCRENAVRKWIPYITENAEPKYVYWNKKEQQEVEVSFNPKIFGYMENIKNHSNTYCKDFVKALCAPFAYNLPRFKNLSIEELFDMHELSEEPKESMKLTD

SEQ ID NO: 234 - DNA, 36 bp, Artificial Sequence
  DR
gaacgacgtcactacacaccgagaggtgtctaaaac

SEQ ID NO: 235 - protein, 927 aa, Artificial Sequence
  Ga0187910_10040531
MAKKKKAKQRREEQEAARMNKIQSAVKAKAETAPAVSSAFVEKRKDKQSKKTFAKASGLKSTLAVDNSAVMTVFGRGNEAKLDHRINADLQSESLHPQAALKNVHAPNKQKIHFIGRMQDMNLTADHPLHSHDGERAVGADLLCAKDKLEQLYFGRTFNDNIHIQLIYQILDIQKILALHANNIIFALDNLLHKKNDELSDDFVGMGRMRATIGYDAFRNSTNQKVQETYREFQEFVRRKELLYFGSAFYNGDTRRDEKVIYHILSLAASVRQFCFHNDYTSDDGKGFIKADWMYRLEEALPAEYKDTLDALYLEGVEGLDQSFLKNNTVNIQILCSIFNHDDPNKIAEEYYGFLMTKEYKNMGFSIKKLRECMLELPELSGYKEDQYNSVRSKLYKLFDFIIAHYFRKHPEKGEEMVDCLRLCMTEDEKDSHYEGTAKKLVRELAYDMQEAAEQANGSNITQMQKNEQQGKTKGMFAIRDEIRVSRKPVSYFSKVIYVMTLLLDGKEINDLLTTLINKFENIVSFEDVLRQLNVDCTFKPEFAFFGYDRCRNISGELRLINSFARMQKPSAKAKHVMYRDALRILGLDNGMSEEALDQEVRRILQIGADGKPIKNANKGFRNFIASNVIESSRFRYLVRYNNPHKTRMIAQNEAIVRFVLSEIPDEQIRRYYDVCRDPKLPRSSSREAQVDILTGIITDVNYRIFEDVPQSKKINKDRPDANDRMTLKKQRYQAIVSLYLTVMYLVTKNLVYVNSRYVMAFHALERDAYLYGITNIKGDYRKLTDNLLADENYKKFGHFKNKKWRGIAEQNLRNSDVPVIKSFRNMAAHISVIRNIDLYIGDIQKVDSYFALYHFLMQKLIQRVVPENTKGLSDQTKKYYDALEQYNTYCKDFVKAYCTPFAYVTPRYKNLTIDGLFDRNRPGEDK

SEQ ID NO: 236 - DNA, 36 bp, Artificial Sequence
  DR
caactactaccctgccaaatggcagggttcagaaac

SEQ ID NO: 237 - protein, 900 aa, Artificial Sequence
  Ga0187911_10069260
MSTKKRFRYSVAAKAAGLKSSLAVDTDRTVMTSFGHGNAAILEKEIVDGEISVLNIENPAFDAVINDKKYALTGHHAGVHALVDQPQNRSDAVHIRGALEKKYFGDTFADNIHVQIAYNILDITKILTVYANNVVYALNNLVHADDDTQADELDSLGNFSAGTSYAKSKSKSKSKQQDFVELFIKKKEIHGYFGDTFAFLDKRIADADKEKQVYAMLACLGSLRQACSHYRIRYSVNGKNVDADADTWLFSSAQLDQTDPLFSEMLNRIYSHKIKTVNQNFFENNRKANFPILKKMYPETTLKVLMNEYYDFSIRKGYKNFGFSIKSLREALLSPQYESLIGVQIKDNKEYDTVRSKLYQLFDFALTRYFNQHPDMVDAFVVELRSLAKDEDAKNAVYEKYAKAVWNDVKQPIAVMLSYMNGSAIKNIKAFELKPDQKELNGIMNSNALDVPHFCKLVYFLTRFLDGKEINDLLTTLVNKFDNIHSFNQVLTALGLSASYEADYKIFEDSGRVVEYLREINSFARMTVDMEKIKRSAYKKALLILGSSKYSDEDLDARVDEMLGVDYNQNGEKIKVRVDTGFRNFIANNVVESSRFHYLIRYCHPRKIRNLAGNAALIEYQLRRLPELQILRYYEACTEPIKRTARTMDEKIGTLIDLIVKMDFSQFEDVQQNDRVRVFSDAEKKEKIRKMREKQRYQSIISLYLTMLYLIVKNLVNINARYVMAFQAWERDNYLLLQLSGKEAEAEYLNLTRHFIEPLDGAKPYLKKRPVEYLKKDMAMVGNSSIRHFRNATVHLNVIMEAHRYTKDIKYIGSYYALYHYILQRHLLDKIEEDSYAEKTVSEKLWESQISQYGTYSKDFVKALCCPFGYNLPRFKNLSIEQLFDRNESKEITDATAPRQ

SEQ ID NO: 238 - DNA, 36 bp, Artificial Sequence
  DR
gaactacagccctgtgaaataacggggttctaaaac

SEQ ID NO: 239 - protein, 991 aa, Artificial Sequence
  MH0288_GL0082219
MKKMTAKERREQEKQKRAEVIRGKQEANRKKAQAAATQDATAPVHHKNAKSLAKAAGLKSTFTLPTGELLMTSFGRGSEALIQKRIMKDVISDVQEGDPAFSVIPMPKQFEIQGRAIDVQKEGSSVPEVLTDDPRASQKPAGADLIGAKPALEKRYFGKTFTDNIHIQLIYRILDIKKVLAIHANNIVYTLDNLSRREGTEGTDFIGIGGLTLKNSYAAYCEPRTFFDEGKEKNIIENIEKSHGEFLEYMKNPRLAYYGEAFYRRLSNNERSKLGMERYERMSDAQRDAFDRKYPIDFCDGELHFREIEKLAPEYVRKSEKEIYYILAMLSELRQCVFHDSAASRSWLYNLEKVLPAEAMQVLDGVYSQKVAALNNFSKTSSKSNFRLLFNALHADTDAQKKQIAEDFYKFSVRKTYKNIGFSIKLLRESMLDTFAPEYKEKSYDSVRGKLYQLVDFLIWNIYDKNEKMADALVAQLRAEVKRDRDEKSPVYDREAARLWTMIREAVAQTAKTLRAVTLSNNTPGSIKIKELALSKYDRDLVENAIDSAVDERGRRLKITDEASYFSKLIYLLTLFLDGKEINDLITTLVNSFDEIDSFCCVLQKAKLDRGFTEGYRFFAHSAEISQELRAINSFARMTTETVQGKPCMFEDAADLLGMDTDLEEVREALEAFYNKEKMSLKWTKDGQEADTGFRNFIISNVLKSSRFRYVVRYGNPKKLREVMQNEAVVKFVLNDLPEEQINRYSENILGLDAAAKEKKVSELARFLRALSLEDFRDVEQSANAARNARKARYQGAMSLYLNVIYQIIKNMVYINSRYTLAFAKYEHDASLLLDNWVYDPYKTVFSDLTEDSLQKGKLNRRAAKYLQTNLEHSDNTLIRQYRNSVAHLNAVRNMNLYIGDLREITSYFGIYHYIMQRDLITRCQKVKMKNPVVVGYFDKVRTYRTCCKDLVKALNITFGYNLPRYKNLSIEGLFDKNRPGDKKESALIAE

SEQ ID NO: 240 - DNA, 36 bp, Artificial Sequence; identical to SEQ ID NO: 203
  DR

SEQ ID NO: 241 - protein, 925 aa, Artificial Sequence
  O2.UC29-0_GL0096317
MERQKRRKKSCAKMAGVKSTFVIDSDLLMTSFGERDKAVREKYIAQGNVKSLRKQEQAFDAQYGKEKIFVTNADNKLHVAINNPLCGNKKQSPEAQEYSRRVLEHKKAINQKYETIVFGKPSNDNIHIQVVSKIMDIEKTFSFVMGNIVYAINNLDPEQNIDNPIDYMSNKARTDENLKRVLRRCMYLFDLGFEYAEPSPYKKSEQQIEQEREEREKENLETLKKALDVISVMRTDSFHGYDMCNSTSAIVKFPSKKFNLDQKGKNLIYRNAFKYKTDTIKKQYAQNSKVNINFLSYVLYGNGCTEEQKKELSREYFNFAILKQYKNLGFSITSLREQLLSLYDIDFECKRNLRSRANSFCDYVLYYRYAVQFPERIVDLVDKLRCSANEKEKTNVYIEEANRIKEDLRIAFNRINNFDAKSIKLYSTKNNVDDQPMLPFEQVSKDIKGGDAAREKADAFCDMTYYLTQFLDGKEINVFLTTLHNLFENIASFLDVMHKQNISYDFTEQYVMFYDSAYIVKKLETVISVSRMKKALDFYNGQALRDAIRVLGISERHVDMDMKEYVDKYLFDDCKDVKHADHNLRNFIVTNVIKSRKFNYLARYSDMATVSKLSKNKEVVKFVLKRVDPKQIERYYRSVCDVRNISAEDEIEKLVDIIYNFNIDELEQVNNAEIGTGHSGRKVASKRSVQERNQARACVSLYLNVLYQIVKNLMNVNSRYSIAFAMTERDMIVEGKGIEAIETFKDDPDAGKKSKKQIAYRTKYIALTEEYLDKGYIKCATERIKENIKKYGGDPKSIDHIPGEYIKKNLEGYCAGSTNTFRNAVAHLALMARVSEYASDIKNVNSYFSLYHYCMQKHILYCARRFNKQGNEKMAAALNDAEIHRSYSKDAVKFLCLPFAYNLPRYKALTVEGLFDWNEYGQDDD

SEQ ID NO: 242 - DNA, 36 bp, Artificial Sequence
  DR
gtactaagaccttactaaatggtaaggttccaaaac

SEQ ID NO: 243 - protein, 954 aa, Artificial Sequence
  PIG-014_GL0226364
MTKPEKKQIKQATLTKRMGLKSTLVFDNKITVTSFANSSNSEKASAHIEKRTDFWGKTIMQDEKMFRTDVEKQQIYIEKEFPDENNKIITQTAMFENPALRNCGKDYIGMKNSVEKVMFGKEFPNDNLHIQIAYNILDIKKIICPYINNVVNIFYNLGRGKLKDDKNDLLGKQIGPKSEEMVEDLLKNSSAYFVYFGDVFKQVKLSKEQQEKSEEEKRRIWQELWNKNFDHNKNIVNSLIKFRQMCFHQNYENSDKEVSSTALFNIEQFLNKEEKASLDEIYTGAIDKVNCDFNKNSSNNLYILEQIYCNDKNLGQRYYDFVVKKSQCNLGLDTKLIRELLIRKLSDEGLDINDSRYDTYRNKIYTVFGFILYYELTKNETFCQEIVAKLRRFGGDEIEKNKIYNEYFLRKEAVYNQIAEKFKQSVCWFKKEKEKKKEFSSKTKIDLRSVQKIEDQNASVFAKMVYLISRFLDGKEINELCTKLLNKFKNINELVETAKRCGETIEFCPEYKMFKNSAKLAEEMRFVQSVSKMKKLTKKEDKSIKPQVIDDALELLGLKIEKYKKDDQGNFVLDDQNHNVWTDEYKSYRKECFTPKNSDSMNDAEKSFVAKGHQKRNFIISNVVLNKRFLYVAKYGSPTACNQMMKNQKIVRMALESISEDQLRKYARRVYDNKEHFQNQTADEIRENLAKKLKNFNIGAELKTVGNLSEKDFRSSKNALKDKSKSLIGLYLTVAYLITKNMIKINTRFSIAFGAYERDMEFLLQQKKEKGKRFDWLALTQKFLSEDKNYYFEHDLRRKEINKISDRDERKKQHRENDKYYDSCMHFSRHSFEYISKNFAEVQSHPDPLKLFIKYRNNVMHLNIIRDLNDYLPDFKRGKAFEKTDTFYDLYCYCLQKMLLSEVDGFSAINENIDKYCTASKDFMNLLNIIFAYNVPRYKNLSNKELFYRLDSEQ

SEQ ID NO: 244 - DNA, 36 bp, Artificial Sequence
  DR
gtacaaaagccctccagtttggacgggttctaagac

SEQ ID NO: 245 - protein, 941 aa, Artificial Sequence
  PIG-018_GL0023397
MAKKLSPRELREQRERERQAKFAKQVQEREAEKAKREKQVSVSDTVGAAAAVQNENGKKSMAKAAGVKSVFAVGDTVYMTSFGRGNDAVLEKKIVDESHESLNKANPAYEITDISSVNYSVEGHRGQSVCATADNPLHHDGGSSVPTDMLCLKPTLERVYFGKTFDDNLHIQLIYNILDIEKILAIYSTNAVYALNNMIADEDDESSDLFQNMTTDYTYDKFRGRSERIVKSFNDFVSNPRLAYYSDAFYEKKGKGSKRRSEKEIYSMLAMLGKLRHWCVHSESGEAEFWLYKLDSLNGEFIDVLNTLYNRSVNEINRGFVDTNKVNIQILQAVCKNMDLISLIKAYYEFLITKKYKNMGFSIKKLREMMLAETAYTSNPDDRLYDKEINSVRNKLYQMTDFIIYLEYRDNKSIIDTLVSKLRSSVTDEAKEAVYREEAANLRGRLLDAVALIAKSLNGVNIKKLQQNTLEIPDSKLENCFIKSAEKVSAFTKLNYLLTRFINGKEINDLLTTLINKFDNIRSFLETMDELGLERTFTENYRFFEDSQKYRDELIELNSFAKSCSFDISAKRIMYRDALDILGIQAELSEDEIGRMIDNILQLDANGERISKNQRENGLRNFIASNVIDSNRFKYLVRYGNPKKIRETAKCPPAVKFVLDGIPDSQIERYYNSCFPEDTAICSADKKRRELAEMISNISFDWFKDAGNVQRVNAEDKSRNAEIKRKNQAIIRLYLTVMYLMLKNLVNVNSRYVIGFHCVERDAKLYKLSGLTIEGNTDKNRTLLTATILGITSADRAPSGEIVADCDLGRAETAANRHLRKKRWYVQIFNNLKQADRNVINEFRNSVCHLNAIRNINTNIEGIGFVKNYFALYHYLIQRHISSKRISFNSFSAEYISNLEKYHTPSEYFIKAYCTPFAYNLVRYKNLTIDGLFDRNAPSEK

SEQ ID NO: 246 - DNA, 36 bp, Artificial Sequence
  DR
gaactacacccctgttaaattgcaggggtctaaaac

SEQ ID NO: 247 - protein, 948 aa, Artificial Sequence
  PIG-025_GL0099734
MAKKMNAKEQRAAIQAEKNKKIQMANAAREKQAEEARLKAEAERIEKEENKKREAELKRFKLDQETRGKLPKNERKSLAKAAGLKSTFAVGTDLYMTSFGKGNDAIVEKKISNKQVTQINTEKENFTVDTDGITDTIVPVQSKRIACLNTQADNPLYRKDSENQVQPDKLLLKDTLEKVYFGKTFNDTLHIQLIYNILDIQKILTVYSVNTVYTLNNLFGKEISERGDFIGALSFQQTYDDYTSDSKNKEIFEDFYSKRSLGYYGHIFFKDKKKRSKREIYDILALIATIRQWCIHSEEDKKTWIYNAENVLDSEYLDILDDVYGGLVEKINKNFIKDNKVNLILLSDILDMKSKDDFEELIRQYYRFIITKEQKLLGFSITKIREAMLEDTVFKTDKKYDSIRSKLYKLIDFMMFYKYTTVDSEKEHADSIVEKLRATLSGESKEEIYKAEANRIWNLYEDIIMNKIEPALDEGVISGLKKNKSYDNMSIEGIVAEETANVSYFSKIIYLLAQFIDGKEVNDLTTTLINKFDNIRSFIDTANQIGLECNLLDEYQFFNTSDTVKKELHVIKNLTGMGYYDVSIKHQMYKDAIDILGLHDNLSDEEINQLIDTNILFIGADGKPVKMAKGKRGFRNFIISNVLKSSRFRYLVKYCNPKKIRKIANNEKIVKFVLGRITETQIERYYYSCNPELKRAAYPGREAAIDDLTKIIINMKFDDFKNVKQSANVEDSSKEAQEKMKYQTIISLYLTVCYHLVKNLVNINARYAMAFHSLERDARLYGIYGSEKDYVEKLKKEQAVLVEKLLSDGPETAGNLHLRSKKWNRLMRVNLENYSAAASQNFRNAVAHLNPIRNADVLIEGIENITSYFDIYHYIVQRSVLNRTNKTPKMKEYEELINKYHTYNKDFVKALCAPFGYNVVRFKALTIYEMFDRNYPEEKRAEEARKSC

SEQ ID NO: 248 - DNA, 36 bp, Artificial Sequence
  DR
taatatgccctatatcaatttataggggttcagaac

SEQ ID NO: 249 - protein, 894 aa, Artificial Sequence
  PIG-028_GL0185479
MSESDKIKIKSKKTRTKRAGLKSSFVSEGKGLMTAFGKGNNAVIEKRISGDLIENVSNKPRFSVEFGNKEYIINDKKLGIVSDDPRESQKPVGEDGIHCKRALEERYFGKTFNDNIHIQLIYSILDLEKILAVHSNNIVYTFDNLRRKETDEYDDFIGYMSTVNSYEEFISPEKLLPGKEQSVYDNINRSQETFLEYRKNPRLGYFGKVFYEKSTDAKDKNKKKMRLISEKEMYYIFALLGGLRQFCTHDKNRARNWLYSLDTMLNDDAKAVLDKYYVSTVSSLNKHFVENSAKKDFSIIFNALNITDIELKKNIAKEYYEFVCRKNFKNIGFSIKKLREYLLEKPEFRNLKDDKYNSVRSKLYRLIDFIIYLNYKDAKFKNDNDEKIERFVSKLRKCPDEASKETVYQTEADIIKKSISGSINSIKRDMMLVKSKYGKLELDTQTVNQLKRAVDDISINTKGDYFTKLMYLISLLIDGKEINDLLTTLIHQFENIASFIDVMKKENIECEFTEKFAFFKNSEIIAHELRTVNSFARMTGFMENDESTKFIMFREAADILGTSYTDDELTDHLNLKKTRLIARSKADMGLRNFIISNVIKSSRFKYLIRYSNPKKVKAIAENKKLVSFVLDKIPDTQIIRYCNTCGFKVGKRQENINTLAEAITYFSFSNFEKVKQSANVENDTPDAIDKAQKQGLISLYLTVLYLFIKNMVYVNSRYVLAFHCLERDSQLLKITSGYNNLSYNNLTNHFIEKEYLNSHARNYLRVNISNSDEWSIVKFRNGVAHLNSVRNIDTSIKGLREFKSYFEIYAYTVQKSIKNYYDAESPVQINPKTIEYMESVDKYGSYTKDFVKALNTPFGYCLARYKNLSIEPLFDRNTVYNKKDVKEEFAVNSK

SEQ ID NO: 250 - DNA, 36 bp, Artificial Sequence
  DR
gaactatagccctccgatttcggagggttctgaaac

SEQ ID NO: 251 - protein, 980 aa, Artificial Sequence
  Ga0224422_10645759
MDKYKLLRNQKFDYVIKLDNIDNIRPILCKEIVNKILKKLKLDFFFSTKEKEIHFTADDIITKKYKKIELVGDDKEVFPIYVRLREVPLKGKAKRLGLKSIFVEDNKLILTTIGKKDDVLIEKEILNNSKNEVISHINPENYAVQEVNYKNISLANDKLKADIDNPSHSKVEETISIKKDYLERKDVIEKKFFNNTFNDNIHIQLAYNIMDINKIFNIYSNEVVFTMENLAHSDDAKDFIGGIDYKKDVIQNAKFNDYFASIFNSLRYFSQAFPNKTFDKIKIDGEKDYNREEIKKNTKIILRILSMFRQFSIHGYTDLFDMEKDPKIRDLLDYFTARYDEVYNNLIRNFIKTSKTNIAIVFEALNLPINDNGLKKEILNDYFDFSITKSYVNMGFNFKRLKEVLISKLGLNVSDSNKQATYNVINYLIYRHLKDNPIVDKYVKCLVASEGDLDKIAIYDAFADEIKLPLKNIITQELVDNQKRNQKYKYFNIDGSWLNTNFNNIDPFCKAIYFLTIFLDTKEINMLVTSIVNKLRNINGLVKVLNNKSDLIYDYRIFDKGNAQKIADQLSVVLSIARMQKNFNKKFKSDNKNSANKPSSDMIYDAYCLFGYKESKETFDEELEADTSKPSKGIAKFQNKITSAIVNSNKFRFIIKYANPRNCYSIMKNTRVVSFVLKEIPQSQIDKYIIKKEKYNSLNYDAKINALAKELADVSIYGMRKAYNIRAKVEANNLELPKLFMTIIYQVIKSLVRINTYYNIAFSCLERDKKLFNVPDDYCDYSDLMLLDAFVYGTNEFEVSKDGKCECITIDVPLNKYERKVDGKIISVQGTKLGSSKYSWLKDDIDVFKEIFYMNNKPTEIESCSVIYRACYRNTIAHLNAISNMTSYLASFVGRNNRMNSYFELYQYIIQMNFINKYKDNYSNEFIDKQSEILKKYKTYSKDLLHILNLPLAYNMARYKNLTIEDIFYDKFINYIKKSE

SEQ ID NO: 252 - DNA, 36 bp, Artificial Sequence
  DR
ggacaataacctgcgaattttggcaggttctatgac

SEQ ID NO: 253 - protein, 996 aa, Artificial Sequence
  ODAI chimera
MLKKCSVCGKKFETNYQGGKPVCRNCRSNKSKPVNPKSSRKPESIDKAIEILTEKLISDCKKNDCASECGKGRRKSKAKAAGLKSALDLGNGQALITSFGKGNEAVPEKRVEGDKIISLREGEAFALAKEPVNHKLVLKSGRIKAEGGPVEFDGPQKNSSMSAVRLDEYNNQIERKFFRGNKVLQDNIRIQIAHNIMDIEKILAVHINNIVYSVNNLFRVQGNEGDDFLGYRGLDKNYSDFCKNKPEDKERFFNFIGKGDGKVTNPRLSYYGAAFAEKVQPTLKYREAEDIYYIICMLGEARQMFAHGNDDRTKTFLYNIVGYRNGTEINSKFTAVLDGIYSKKVEELNGNFIKNSKKDLTILFSAFGCQDEASKKKLIEKYYDFIVKKTNKNMGFSVTKLREKIIEGYRFRGNPVTGTDYDSVRHKLYRTFDFIICSYYDDHAKEKDTLVSSLRASLNDTKKENLYAGEAKTIAESIKDRMDTVCRMYNKGEGIKHITVDRFIAGAGAGKLIDKCSISTECDYFCKFIYLMTLFIDGKEINDLLTTLINKFDNIDSPSVDKAVNNQNRVEFGDKYDMFNKAGEICESLRSINSFARMESPAPAAKRTMFVDAIRMFGFADVSDNDAEKFYKENIEPFIYDRNGDIEDEWKKGKLVHKKDEKKKGVYNFIATNVIESNRFQYLVRYANTEKIAALARNETIVRFVIKKLPAAQIVRYYIACNRIRENINSNVLTSDDMAESLVKLVTGMDFGKIKGVRNDDRSGDKEMKKAIVTLYLTILYHLTKNLVYVNSRYFMAFHCLERDMNLFGEGQKQALRNTGDYPADNADLRRRDIKYCVLTKAHIKQEEVKSRRNDTDSKSQQKAKSRRRRWCLLLKEDIDKLNGCESLRILYRNAVAHLNIPRNAIDYIGGIKKADSYFAIYHYMMQQYLSKKHGLPEGLGCTHGVYCKDLVKALNAPFGYNLPRFKNLSVEALFDMNEEPAPEGKERSKNADGCN

SEQ ID NO: 254 - DNA, 36 bp, Artificial Sequence; identical to SEQ ID NO: 159
  DR

SEQ ID NO: 255 - protein, 6 aa, Artificial Sequence
  HEPN motif
  SITE (2)..(5): Xaa can be any naturally occurring amino acid
RXXXXH

SEQ ID NO: 256 - protein, 11 aa, Artificial Sequence
  N-terminal NLS
SPKKKRKVEAS

SEQ ID NO: 257 - DNA, 33 bp, Artificial Sequence
  N-terminal NLS
agccccaagaagaagagaaaggtggaggccagc

SEQ ID NO: 258 - protein, 11 aa, Artificial Sequence
  C-terminal NLS
GPKKKRKVAAA

SEQ ID NO: 259 - RNA, 20 nt, Artificial Sequence
  dCas9 target
uuaucgucuguuuguggaug

SEQ ID NO: 260 - DNA, 33 bp, Artificial Sequence
  C-terminal NLS
ggacctaagaaaaagaggaaggtggcggccgct

SEQ ID NO: 261 - RNA, 271 nt, Artificial Sequence
  Eubacterium siraeum nCas1 array targeting ccdB
gaacuacacccgugcaaaaaugcaggggucuaaaacuaacggcucucucuuuuauagguguaaaccgaacuacacccgugcaaaaaugcaggggucuaaaaccuuuaucugacagcagacgugcacuggccagaacuacacccgugcaaaaaugcaggggucuaaaaccaucaugcgccagcuuucauccccgauauggaacuacacccgugcaaaaaugcaggggucuaaaacuaauggcguuuuugaugucauuuucgcgguccgcuga

SEQ ID NO: 262 - RNA, 36 nt, Artificial Sequence
  Eubacterium siraeum nCas1 array targeting ccdB - full 36 nt direct repeat
gaacuacacccgugcaaaaaugcaggggucuaaaac

SEQ ID NO: 263 - RNA, 30 nt, Artificial Sequence
  Eubacterium siraeum nCas1 array targeting ccdB - spacer 1
uaacggcucucucuuuuauagguguaaacc

SEQ ID NO: 264 - RNA, 30 nt, Artificial Sequence
  Eubacterium siraeum nCas1 array targeting ccdB - spacer 2
cuuuaucugacagcagacgugcacuggcca

SEQ ID NO: 265 - RNA, 30 nt, Artificial Sequence
  Eubacterium siraeum nCas1 array targeting ccdB - spacer 3
caucaugcgccagcuuucauccccgauaug

SEQ ID NO: 266 - RNA, 37 nt, Artificial Sequence
  Eubacterium siraeum nCas1 array targeting ccdB - spacer 4
uaauggcguuuuugaugucauuuucgcgguccgcuga

SEQ ID NO: 267 - RNA, 268 nt, Artificial Sequence
  uncultured Ruminoccus sp. nCas1 array targeting ccdB
cuacuacacuggugcaaauuugcacuagucuaaaacuaacggcucucucuuuuauagguguaaacccuacuacacuggugcaaauuugcacuagucuaaaaccuuuaucugacagcagacgugcacuggccacuacuacacuggugcaaauuugcacuagucuaaaaccaucaugcgccagcuuucauccccgauaugcuacuacacuggugcaaauuugcacuagucuaaaacuaauggcguuuuugaugucauuuucgcgguccgc

SEQ ID NO: 268 - RNA, 36 nt, Artificial Sequence
  uncultured Ruminoccus sp. nCas1 array targeting ccdB -  full 36 nt direct repeat
cuacuacacuggugcaaauuugcacuagucuaaaac

SEQ ID NO: 269 - RNA, 30 nt, Artificial Sequence; identical to SEQ ID NO: 263
  uncultured Ruminoccus sp. nCas1 array targeting ccdB -spacer 1

SEQ ID NO: 270 - RNA, 30 nt, Artificial Sequence; identical to SEQ ID NO: 264
  uncultured Ruminoccus sp. nCas1 array targeting ccdB - spacer 2

SEQ ID NO: 271 - RNA, 30 nt, Artificial Sequence; identical to SEQ ID NO: 265
  uncultured Ruminoccus sp. nCas1 array targeting ccdB - spacer 3

SEQ ID NO: 272 - RNA, 37 nt, Artificial Sequence; identical to SEQ ID NO: 266
  uncultured Ruminoccus sp. nCas1 array targeting ccdB -spacer 4

SEQ ID NO: 273 - RNA, 303 nt, Artificial Sequence
  Target RNA (ccdB sequence)
augcaguuuaagguuuacaccuauaaaagagagagccguuaucgucuguuuguggauguacagagugauauuauugacacgcccgggcgacggauggugaucccccuggccagugcacgucugcugucagauaaagucucccgugaacuuuacccgguggugcauaucggggaugaaagcuggcgcaugaugaccaccgauauggccagugugccggucuccguuaucggggaagaaguggcugaucucagccaccgcgaaaaugacaucaaaaacgccauuaaccugauguuuuggggaaua

SEQ ID NO: 274 - RNA, 30 nt, Artificial Sequence
  Target RNA (ccdB sequence) - spacer 1
gguuuacaccuauaaaagagagagccguua

SEQ ID NO: 275 - RNA, 30 nt, Artificial Sequence
  Target RNA (ccdB sequence) - spacer 2
uggccagugcacgucugcugucagauaaag

SEQ ID NO: 276 - RNA, 30 nt, Artificial Sequence
  Target RNA (ccdB sequence) - spacer 3
cauaucggggaugaaagcuggcgcaugaug

SEQ ID NO: 277 - RNA, 30 nt, Artificial Sequence
  Target RNA (ccdB sequence)
accgcgaaaaugacaucaaaaacgccauua

SEQ ID NO: 278 - protein, 915 aa, Artificial Sequence
  Mutated Cas13d sequence, NLS-Ga_0531(trunc)-NLS-HA
MSPKKKRKVEASKQSKKTFAKASGLKSTLAVDNSAVMTVFGRGNEAKLDHRINADLQSESLHPQAALKNVHAPNKQKIHFIGRMQDMNLTADHPLHSHDGERAVGADLLCAKDKLEQLYFGRTFNDNIHIQLIYQILDIQKILALHANNIIFALDNLLHKKNDELSDDFVGMGRMRATIGYDAFRNSTNQKVQETYREFQEFVRRKELLYFGSAFYNGDTRRDEKVIYHILSLAASVRQFCFHNDYTSDDGKGFIKADWMYRLEEALPAEYKDTLDALYLEGVEGLDQSFLKNNTVNIQILCSIFNHDDPNKIAEEYYGFLMTKEYKNMGFSIKKLRECMLELPELSGYKEDQYNSVRSKLYKLFDFIIAHYFRKHPEKGEEMVDCLRLCMTEDEKDSHYEGTAKKLVRELAYDMQEAAEQANGSNITQMQKNEQQGKTKGMFAIRDEIRVSRKPVSYFSKVIYVMTLLLDGKEINDLLTTLINKFENIVSFEDVLRQLNVDCTFKPEFAFFGYDRCRNISGELRLINSFARMQKPSAKAKHVMYRDALRILGLDNGMSEEALDQEVRRILQIGADGKPIKNANKGFRNFIASNVIESSRFRYLVRYNNPHKTRMIAQNEAIVRFVLSEIPDEQIRRYYDVCRDPKLPRSSSREAQVDILTGIITDVNYRIFEDVPQSKKINKDRPDANDRMTLKKQRYQAIVSLYLTVMYLVTKNLVYVNSRYVMAFHALERDAYLYGITNIKGDYRKLTDNLLADENYKKFGHFKNKKWRGIAEQNLRNSDVPVIKSFRNMAAHISVIRNIDLYIGDIQKVDSYFALYHFLMQKLIQRVVPENTKGLSDQTKKYYDALEQYNTYCKDFVKAYCTPFAYVTPRYKNLTIDGLFDRNRPGEDKGSGPKKKRKVAAAYPYDVPDYA

SEQ ID NO: 279 - protein, 919 aa, Artificial Sequence
  Mutated Cas13d sequence, NES-Ga_0531(trunc)-NES-HA
MLQLPPLERLTLGSGKQSKKTFAKASGLKSTLAVDNSAVMTVFGRGNEAKLDHRINADLQSESLHPQAALKNVHAPNKQKIHFIGRMQDMNLTADHPLHSHDGERAVGADLLCAKDKLEQLYFGRTFNDNIHIQLIYQILDIQKILALHANNIIFALDNLLHKKNDELSDDFVGMGRMRATIGYDAFRNSTNQKVQETYREFQEFVRRKELLYFGSAFYNGDTRRDEKVIYHILSLAASVRQFCFHNDYTSDDGKGFIKADWMYRLEEALPAEYKDTLDALYLEGVEGLDQSFLKNNTVNIQILCSIFNHDDPNKIAEEYYGFLMTKEYKNMGFSIKKLRECMLELPELSGYKEDQYNSVRSKLYKLFDFIIAHYFRKHPEKGEEMVDCLRLCMTEDEKDSHYEGTAKKLVRELAYDMQEAAEQANGSNITQMQKNEQQGKTKGMFAIRDEIRVSRKPVSYFSKVIYVMTLLLDGKEINDLLTTLINKFENIVSFEDVLRQLNVDCTFKPEFAFFGYDRCRNISGELRLINSFARMQKPSAKAKHVMYRDALRILGLDNGMSEEALDQEVRRILQIGADGKPIKNANKGFRNFIASNVIESSRFRYLVRYNNPHKTRMIAQNEAIVRFVLSEIPDEQIRRYYDVCRDPKLPRSSSREAQVDILTGIITDVNYRIFEDVPQSKKINKDRPDANDRMTLKKQRYQAIVSLYLTVMYLVTKNLVYVNSRYVMAFHALERDAYLYGITNIKGDYRKLTDNLLADENYKKFGHFKNKKWRGIAEQNLRNSDVPVIKSFRNMAAHISVIRNIDLYIGDIQKVDSYFALYHFLMQKLIQRVVPENTKGLSDQTKKYYDALEQYNTYCKDFVKAYCTPFAYVTPRYKNLTIDGLFDRNRPGEDKGSGLQLPPLERLTLYPYDVPDYA

SEQ ID NO: 280 - protein, 1000 aa, Artificial Sequence
  Mutated Cas13d sequence, NLS-RfxCas13d-NLS-HA
MSPKKKRKVEASIEKKKSFAKGMGVKSTLVSGSKVYMTTFAEGSDARLEKIVEGDSIRSVNEGEAFSAEMADKNAGYKIGNAKFSHPKGYAVVANNPLYTGPVQQDMLGLKETLEKRYFGESADGNDNICIQVIHNILDIEKILAEYITNAAYAVNNISGLDKDIIGFGKFSTVYTYDEFKDPEHHRAAFNNNDKLINAIKAQYDEFDNFLDNPRLGYFGQAFFSKEGRNYIINYGNECYDILALLSGLRHWVVHNNEEESRISRTWLYNLDKNLDNEYISTLNYLYDRITNELTNSFSKNSAANVNYIAETLGINPAEFAEQYFRFSIMKEQKNLGFNITKLREVMLDRKDMSEIRKNHKVFDSIRTKVYTMMDFVIYRYYIEEDAKVAAANKSLPDNEKSLSEKDIFVINLRGSFNDDQKDALYYDEANRIWRKLENIMHNIKEFRGNKTREYKKKDAPRLPRILPAGRDVSAFSKLMYALTMFLDGKEINDLLTTLINKFDNIQSFLKVMPLIGVNAKFVEEYAFFKDSAKIADELRLIKSFARMGEPIADARRAMYIDAIRILGTNLSYDELKALADTFSLDENGNKLKKGKHGMRNFIINNVISNKRFHYLIRYGDPAHLHEIAKNEAVVKFVLGRIADIQKKQGQNGKNQIDRYYETCIGKDKGKSVSEKVDALTKIITGMNYDQFDKKRSVIEDTGRENAEREKFKKIISLYLTVIYHILKNIVNINARYVIGFHCVERDAQLYKEKGYDINLKKLEEKGFSSVTKLCAGIDETAPDKRKDVEKEMAERAKESIDSLESANPKLYANYIKYSDEKKAEEFTRQINREKAKTALNAYLRNTKWNVIIREDLLRIDNKTCTLFRNKAVHLEVARYVHAYINDIAEVNSYFQLYHYIMQRIIMNERYEKSSGKVSEYFDAVNDEKKYNDRLLKLLCVPFGYCIPRFKNLSIEALFDRNEAAKFDKEKKKVSGNSGSGPKKKRKVAAAYPYDVPDYA

SEQ ID NO: 281 - protein, 980 aa, Artificial Sequence
  Mutated Cas13d sequence, NLS-RfxCas13d(del5)-NLS-HA
MSPKKKRKVEASIEKKKSFAKGMGVKSTLVSGSKVYMTTFAEGSDARLEKIVEGDSIRSVNEGEAFSAEMADKNAGYKIGNAKFSHPKGYAVVANNPLYTGPVQQDMLGLKETLEKRYFGESADGNDNICIQVIHNILDIEKILAEYITNAAYAVNNISGLDKDIIGFGKFSTVYTYDEFKDPEHHRAAFNNNDKLINAIKAQYDEFDNFLDNPRLGYFGQAFFSKEGRNYIINYGNECYDILALLSGLRHWVVHNNEEESRISRTWLYNLDKNLDNEYISTLNYLYDRITNELTNSFSKNSAANVNYIAETLGINPAEFAEQYFRFSIMKEQKNLGFNITKLREVMLDRKDMSEIRKNHKVFDSIRTKVYTMMDFVIYRYYIEEDAKVAAANKSLPDNEKSLSEKDIFVINLRGSFNDDQKDALYYDEANRIWRKLENIMHNIKEFRGNKTREYKKKDAPRLPRILPAGRDVSAFSKLMYALTMFLDGKEINDLLTTLINKFDNIQSFLKVMPLIGVNAKFVEEYAFFKDSAKIADELRLIKSFARMGEPIADARRAMYIDAIRILGGGGGSGGGGSMRNFIINNVISNKRFHYLIRYGDPAHLHEIAKNEAVVKFVLGRIADIQKKQGQNGKNQIDRYYETCIGKDKGKSVSEKVDALTKIITGMNYDQFDKKRSVIEDTGRENAEREKFKKIISLYLTVIYHILKNIVNINARYVIGFHCVERDAQLYKEKGYDINLKKLEEKGFSSVTKLCAGIDETAPDKRKDVEKEMAERAKESIDSLESANPKLYANYIKYSDEKKAEEFTRQINREKAKTALNAYLRNTKWNVIIREDLLRIDNKTCTLFRNKAVHLEVARYVHAYINDIAEVNSYFQLYHYIMQRIIMNERYEKSSGKVSEYFDAVNDEKKYNDRLLKLLCVPFGYCIPRFKNLSIEALFDRNEAAKFDKEKKKVSGNSGSGPKKKRKVAAAYPYDVPDYA

SEQ ID NO: 282 - protein, 965 aa, Artificial Sequence
  Mutated Cas13d sequence, NLS-RfxCas13d(del5.12)-NLS-HA
MSPKKKRKVEASIEKKKSFAKGMGVKSTLVSGSKVYMTTFAEGSDARLEKIVEGDSIRSVNEGEAFSAEMADKNAGYKIGNAKFSHPKGYAVVANNPLYTGPVQQDMLGLKETLEKRYFGESADGNDNICIQVIHNILDIEKILAEYITNAAYAVNNISGLDKDIIGFGKFSTVYTYDEFKDPEHHRAAFNNNDKLINAIKAQYDEFDNFLDNPRLGYFGQAFFSKEGRNYIINYGNECYDILALLSGLRHWVVHNNEEESRISRTWLYNLDKNLDNEYISTLNYLYDRITNELTNSFSKNSAANVNYIAETLGINPAEFAEQYFRFSIMKEQKNLGFNITKLREVMLDRKDMSEIRKNHKVFDSIRTKVYTMMDFVIYRYYIEEDAKVAAANKSLPDNEKSLSEKDIFVINLRGSFNDDQKDALYYDEANRIWRKLENIMHNIKEFRGNKTREYKKKDAPRLPRILPAGRDVSAFSKLMYALTMFLDGKEINDLLTTLINKFDNIQSFLKVMPLIGVNAKFVEEYAFFKDSAKIADELRLIKSFARMGEPIADARRAMYIDAIRILGGGGGSGGGGSMRNFIINNVISNKRFHYLIRYGDPAHLHEIAKNEAVVKFVLGRIADIQKKQGQNGKNQIDRYYETCIGKDKGKSVSEKVDALTKIITGMNYDQFDKKRSVIEDTGRENAEREKFKKIISLYLTVIYHILKNIVNINARYVIGFHCVERDAQLYKEKGYDINLKKLEEKGFSSVTKLCAGIDETAPDKRKDVEKEMAERAKESIDSLESANPKLYANYIKYSDEKKAEEFTRQINREKAKTALNAYLRNTKWNVIIREDLLRIDNKTCTLFRNKAVHLEVARYVHAYINDIAEVNSYFQLYHYIMQRIIMNERYEKSSGKVSEYFDAVNDEKKYNDRLLKLLCVPFGYCIPRFKNLSIEALFDRNEGSGPKKKRKVAAAYPYDVPDYA

SEQ ID NO: 283 - protein, 963 aa, Artificial Sequence
  Mutated Cas13d sequence, NLS-RfxCas13d(del5.13)-NLS-HA
MSPKKKRKVEASIEKKKSFAKGMGVKSTLVSGSKVYMTTFAEGSDARLEKIVEGDSIRSVNEGEAFSAEMADKNAGYKIGNAKFSHPKGYAVVANNPLYTGPVQQDMLGLKETLEKRYFGESADGNDNICIQVIHNILDIEKILAEYITNAAYAVNNISGLDKDIIGFGKFSTVYTYDEFKDPEHHRAAFNNNDKLINAIKAQYDEFDNFLDNPRLGYFGQAFFSKEGRNYIINYGNECYDILALLSGLRHWVVHNNEEESRISRTWLYNLDKNLDNEYISTLNYLYDRITNELTNSFSKNSAANVNYIAETLGINPAEFAEQYFRFSIMKEQKNLGFNITKLREVMLDRKDMSEIRKNHKVFDSIRTKVYTMMDFVIYRYYIEEDSEKDIFVINLRGSFNDDQKDALYYDEANRIWRKLENIMHNIKEFRGNKTREYKKKDAPRLPRILPAGRDVSAFSKLMYALTMFLDGKEINDLLTTLINKFDNIQSFLKVMPLIGVNAKFVEEYAFFKDSAKIADELRLIKSFARMGEPIADARRAMYIDAIRILGGGGGSGGGGSMRNFIINNVISNKRFHYLIRYGDPAHLHEIAKNEAVVKFVLGRIADIQKKQGQNGKNQIDRYYETCIGKDKGKSVSEKVDALTKIITGMNYDQFDKKRSVIEDTGRENAEREKFKKIISLYLTVIYHILKNIVNINARYVIGFHCVERDAQLYKEKGYDINLKKLEEKGFSSVTKLCAGIDETAPDKRKDVEKEMAERAKESIDSLESANPKLYANYIKYSDEKKAEEFTRQINREKAKTALNAYLRNTKWNVIIREDLLRIDNKTCTLFRNKAVHLEVARYVHAYINDIAEVNSYFQLYHYIMQRIIMNERYEKSSGKVSEYFDAVNDEKKYNDRLLKLLCVPFGYCIPRFKNLSIEALFDRNEAAKFDKEKKKVSGNSGSGPKKKRKVAAAYPYDVPDYA

SEQ ID NO: 284 - protein, 948 aa, Artificial Sequence
  Mutated Cas13d sequence, NLS-RfxCas13d(del5.12+5.13)-NLS-HA
MSPKKKRKVEASIEKKKSFAKGMGVKSTLVSGSKVYMTTFAEGSDARLEKIVEGDSIRSVNEGEAFSAEMADKNAGYKIGNAKFSHPKGYAVVANNPLYTGPVQQDMLGLKETLEKRYFGESADGNDNICIQVIHNILDIEKILAEYITNAAYAVNNISGLDKDIIGFGKFSTVYTYDEFKDPEHHRAAFNNNDKLINAIKAQYDEFDNFLDNPRLGYFGQAFFSKEGRNYIINYGNECYDILALLSGLRHWVVHNNEEESRISRTWLYNLDKNLDNEYISTLNYLYDRITNELTNSFSKNSAANVNYIAETLGINPAEFAEQYFRFSIMKEQKNLGFNITKLREVMLDRKDMSEIRKNHKVFDSIRTKVYTMMDFVIYRYYIEEDSEKDIFVINLRGSFNDDQKDALYYDEANRIWRKLENIMHNIKEFRGNKTREYKKKDAPRLPRILPAGRDVSAFSKLMYALTMFLDGKEINDLLTTLINKFDNIQSFLKVMPLIGVNAKFVEEYAFFKDSAKIADELRLIKSFARMGEPIADARRAMYIDAIRILGGGGGSGGGGSMRNFIINNVISNKRFHYLIRYGDPAHLHEIAKNEAVVKFVLGRIADIQKKQGQNGKNQIDRYYETCIGKDKGKSVSEKVDALTKIITGMNYDQFDKKRSVIEDTGRENAEREKFKKIISLYLTVIYHILKNIVNINARYVIGFHCVERDAQLYKEKGYDINLKKLEEKGFSSVTKLCAGIDETAPDKRKDVEKEMAERAKESIDSLESANPKLYANYIKYSDEKKAEEFTRQINREKAKTALNAYLRNTKWNVIIREDLLRIDNKTCTLFRNKAVHLEVARYVHAYINDIAEVNSYFQLYHYIMQRIIMNERYEKSSGKVSEYFDAVNDEKKYNDRLLKLLCVPFGYCIPRFKNLSIEALFDRNEGSGPKKKRKVAAAYPYDVPDYA

SEQ ID NO: 285 - protein, 983 aa, Artificial Sequence
  Mutated Cas13d sequence, NLS-RfxCas13d(del13)-NLS-HA
MSPKKKRKVEASIEKKKSFAKGMGVKSTLVSGSKVYMTTFAEGSDARLEKIVEGDSIRSVNEGEAFSAEMADKNAGYKIGNAKFSHPKGYAVVANNPLYTGPVQQDMLGLKETLEKRYFGESADGNDNICIQVIHNILDIEKILAEYITNAAYAVNNISGLDKDIIGFGKFSTVYTYDEFKDPEHHRAAFNNNDKLINAIKAQYDEFDNFLDNPRLGYFGQAFFSKEGRNYIINYGNECYDILALLSGLRHWVVHNNEEESRISRTWLYNLDKNLDNEYISTLNYLYDRITNELTNSFSKNSAANVNYIAETLGINPAEFAEQYFRFSIMKEQKNLGFNITKLREVMLDRKDMSEIRKNHKVFDSIRTKVYTMMDFVIYRYYIEEDSEKDIFVINLRGSFNDDQKDALYYDEANRIWRKLENIMHNIKEFRGNKTREYKKKDAPRLPRILPAGRDVSAFSKLMYALTMFLDGKEINDLLTTLINKFDNIQSFLKVMPLIGVNAKFVEEYAFFKDSAKIADELRLIKSFARMGEPIADARRAMYIDAIRILGTNLSYDELKALADTFSLDENGNKLKKGKHGMRNFIINNVISNKRFHYLIRYGDPAHLHEIAKNEAVVKFVLGRIADIQKKQGQNGKNQIDRYYETCIGKDKGKSVSEKVDALTKIITGMNYDQFDKKRSVIEDTGRENAEREKFKKIISLYLTVIYHILKNIVNINARYVIGFHCVERDAQLYKEKGYDINLKKLEEKGFSSVTKLCAGIDETAPDKRKDVEKEMAERAKESIDSLESANPKLYANYIKYSDEKKAEEFTRQINREKAKTALNAYLRNTKWNVIIREDLLRIDNKTCTLFRNKAVHLEVARYVHAYINDIAEVNSYFQLYHYIMQRIIMNERYEKSSGKVSEYFDAVNDEKKYNDRLLKLLCVPFGYCIPRFKNLSIEALFDRNEAAKFDKEKKKVSGNSGSGPKKKRKVAAAYPYDVPDYA

SEQ ID NO: 286 - protein, 1378 aa, Artificial Sequence
  Effector sequence used to edit ADAR2 expression
MIEKKKSFAKGMGVKSTLVSGSKVYMTTFAEGSDARLEKIVEGDSIRSVNEGEAFSAEMADKNAGYKIGNAKFSHPKGYAVVANNPLYTGPVQQDMLGLKETLEKRYFGESADGNDNICIQVIHNILDIEKILAEYITNAAYAVNNISGLDKDIIGFGKFSTVYTYDEFKDPEHHRAAFNNNDKLINAIKAQYDEFDNFLDNPRLGYFGQAFFSKEGRNYIINYGNECYDILALLSGLRHWVVHNNEEESRISRTWLYNLDKNLDNEYISTLNYLYDRITNELTNSFSKNSAANVNYIAETLGINPAEFAEQYFRFSIMKEQKNLGFNITKLREVMLDRKDMSEIRKNHKVFDSIRTKVYTMMDFVIYRYYIEEDAKVAAANKSLPDNEKSLSEKDIFVINLRGSFNDDQKDALYYDEANRIWRKLENIMHNIKEFRGNKTREYKKKDAPRLPRILPAGRDVSAFSKLMYALTMFLDGKEINDLLTTLINKFDNIQSFLKVMPLIGVNAKFVEEYAFFKDSAKIADELRLIKSFARMGEPIADARRAMYIDAIRILGTNLSYDELKALADTFSLDENGNKLKKGKHGMRNFIINNVISNKRFHYLIRYGDPAHLHEIAKNEAVVKFVLGRIADIQKKQGQNGKNQIDRYYETCIGKDKGKSVSEKVDALTKIITGMNYDQFDKKRSVIEDTGRENAEREKFKKIISLYLTVIYHILKNIVNINARYVIGFHCVERDAQLYKEKGYDINLKKLEEKGFSSVTKLCAGIDETAPDKRKDVEKEMAERAKESIDSLESANPKLYANYIKYSDEKKAEEFTRQINREKAKTALNAYLRNTKWNVIIREDLLRIDNKTCTLFRNKAVALEVARYVHAYINDIAEVNSYFQLYHYIMQRIIMNERYEKSSGKVSEYFDAVNDEKKYNDRLLKLLCVPFGYCIPRFKNLSIEALFDRNEAAKFDKEKKKVSGNSSRGSGPKKKRKVAAAYPYDVPDYAGSQLHLPQVLADAVSRLVLGKFGDLTDNFSSPHARRKVLAGVVMTTGTDVKDAKVISVSTGTKCINGEYMSDRGLALNDCHAEIISRRSLLRFLYTQLELYLNNKDDQKRSIFQKSERGGFRLKENVQFHLYISTSPCGDARIFSPHEPILEEPADRHPNRKARGQLRTKIESGQGTIPVRSNASIQTWDGVLQGERLLTMSCSDKIARWNVVGIQGSLLSIFVEPIYFSSIILGSLYHGDHLSRAMYQRISNIEDLPPLYTLNKPLLSGISNAEARQPGKAPNFSVNWTVGDSAIEVINATTGKDELGRASRLCKHALYCRWMRVHGKVPSHLLRSKITKPNVYHESKLAAKEYQAAKARLFTAFIKAGLGAWVEKPTEQDQFSLT

SEQ ID NO: 287 - protein, 11 aa, Artificial Sequence
  HIV NES
LQLPPLERLTL

SEQ ID NO: 288 - protein, 26 aa, Artificial Sequence
  Cas sequence
  SITE (2)..(2): Xaa can be any naturally occurring amino acid
  SITE (8)..(12): Xaa can be any naturally occurring amino acid
  SITE (15)..(15): Xaa can be any naturally occurring amino acid
  SITE (18)..(19): Xaa can be any naturally occurring amino acid
  SITE (21)..(26): Xaa can be any naturally occurring amino acid
LXGKEINXXXXXLIXKFXXIXXXXXX

SEQ ID NO: 289 - protein, 50 aa, Artificial Sequence
  Cas sequence
  SITE (3)..(3): Xaa can be any naturally occurring amino acid
  SITE (5)..(6): Xaa can be any naturally occurring amino acid
  SITE (9)..(13): Xaa can be any naturally occurring amino acid
  SITE (15)..(15): Xaa can be any naturally occurring amino acid
  SITE (17)..(31): Xaa can be any naturally occurring amino acid
  SITE (33)..(38): Xaa can be any naturally occurring amino acid
  SITE (41)..(50): Xaa can be any naturally occurring amino acid
RNXIXXNVXXXXXFXYXXXXXXXXXXXXXXXNXXXXXXVLXXXXXXXXXX

SEQ ID NO: 290 - protein, 33 aa, Artificial Sequence
  Cas sequence
  SITE (2)..(6): Xaa can be any naturally occurring amino acid
  SITE (8)..(10): Xaa can be any naturally occurring amino acid
  SITE (12)..(13): Xaa can be any naturally occurring amino acid
  SITE (15)..(16): Xaa can be any naturally occurring amino acid
  SITE (18)..(18): Xaa can be any naturally occurring amino acid
  SITE (20)..(27): Xaa can be any naturally occurring amino acid
  SITE (31)..(33): Xaa can be any naturally occurring amino acid
LXXXXXYXXXKXXVXXNXRXXXXXXXXERDXXX

SEQ ID NO: 291 - protein, 21 aa, Artificial Sequence
  Cas sequence
  SITE (3)..(3): Xaa can be any naturally occurring amino acid
  SITE (5)..(7): Xaa can be any naturally occurring amino acid
  SITE (9)..(9): Xaa can be any naturally occurring amino acid
  SITE (13)..(16): Xaa can be any naturally occurring amino acid
  SITE (19)..(21): Xaa can be any naturally occurring amino acid
PFXYXXXRXKNLXXXXLFXXX

SEQ ID NO: 292 - protein, 1057 aa, Artificial Sequence
  MH_4866
MEENKVRFTNTSNVKRPKSLLKQMGHKSTFLLDDTLIVTSVAKGKNEDQKGKEQAASKSKVAPQSHIELLSTIDGEVLGGRKELLATTVSRQEVTISGKIYNLNTKTPESTTVTMANPAVLLQKNSSTTQVARKTDYLGIKSALEKEFFNDFSNSGFNDNVRVQIAYNILDIRKILATTINNIVSMFYNLDRTTGDIADETKKSTNTDIIGMIKTYLKYDQAKNSNDPSIKKTFNKAEELLINTKAYHTYFDRLFTTPTRQAFKAGKLKDTNDKKSNLPCEFSKLSEKDQEEFKNEAITHNYDVLRLLGLGRQLVVHEKYKSDEHNKDNSIESLFNIDKIIRNSNDTMDLLKRLDNIYLESAEQIDNSFKKSSATNCLILEELYKRIGKAKTQAELYKDYYRYAILKEDQCLGISFNRIKEAVLEKLKEEQRYKNFEYRNDNKRFYTLCNFVLWHYMVDLRDRNETRAGHQQTDRNEIEELKSKLRACCDNNGDGGENQKYAIYKEFVNFHWTDLRTSINTLYDLCVKYKYTAKNYRIDSKIQIDNQLSSSANNVKTFVKYIYFLSEFLDGKEVNVFFNELVEKFSNIAEIVTTVNDNINNSSKKSPNISFLPQYSLFQEAGTVADQLRNARNIKHATLRARINDKVADKDSKMSPSKQTISDALYMLIDENDTIENYKQLIWDEKESGTWVKKATGNNKVRNFIINNIIMSKWFMYISKYSDPRNCSKIMHNKEAVVFAMSSIPDAQIEKYYKRVTAKSVQYGNKTAEEMRSIVIDALMNFSLKPVLTGVANNDYSNENRERDIGIIQLYLTVAYIVTKSLVNVNKRFLLAFSCLERDVPLILNGKSFKDANILVLSEKFIAEDQEIEQKYKLAKKNRITPNMSKEDVKNVFKELNAEYKSKHYAESLTRPRDPDSKKDKSCAYLVNNLNEAKKIENVLMDFKNKVDHLNVVKSAPEYMSNIKNIDSFYGIFCFALQNILADKMIKWSVNEKNSKEDVEIINSYGQELKKKLDSRHTFDRDAMWIINMPFAYNFPRYKNLSSEYLFYDKEYEKTKK

SEQ ID NO: 293 - protein, 945 aa, Artificial Sequence
  037 - emb|OIZA01000315.1|  compressed
MAKKKRMTAKERKQNHRESLMKKADSNAEKEKAKKPVVENKPDTAISKDNKPKPNKEIKKSKAKLAGVKWIIKANDDVTYISSFGKGNNSVLEKRIIGDVSGDVNKDSHMYVNPKYTKKNYEIKNGFSSGSSLVTYPNKPDKNSGMDALCLKPYFEIDFFGHIFTDNMHIQAIYNIFDIEKILAKHITNIIYTVNSFDRNYNQSGNDTIGFDLNYRVPYLEYGGGKDSNGKPNKISAWKKRENFINFYNEAKPHLGYYENIFYDHGEPISEEKFYNYLNILNFIRNNTFHYKDNDIELYSENYSEEYVFINCLNEFVKNKFKNVNKNFISNEKNNLYIILKAYGEDTENVEVVKKYSKELYKLSVLKTNKNLGVNVKKLRESAIEYGYCPLPYDKEKEVAKLSSVKHKLYKTYDFVITHYLNSNDKLLLEIVETLRLSKNDDEKENVYKKYAEKLFKADDVINPIKAISKLFAEKGNKLFKEKIIIKKEYIEDVSIDKNIYDFTKVIFFMTCFLDGKEINDLLTNIISKLQVIEDHNNVIKFIFHNKDAVYKDYSDKYAIFRNAGKIATELEAIKSIARMENKIENAPKEPLLKDALLALGVSSNDFDEKYEKYFKTDVDADKDHQKVSTFLMNNVINNSRFKYVVKYINPADINGLAKNRYLVKFVLSKIPEEQIDSYYKLFSNEEEPSCEEKIKLLTKKISKLNFQTLFENNKIPNVEKERKKAIITLYFTIVYILVKNLVNINGLYTLALYFVERDGFFYKQICEKKLIETLKKKDKKQLYNDDDYLLLPEIFSGSKYREETKNLKLPKEKDRDIMKKYLPNDKDREEYNKFFKQYRNNIVHLKIIAKLSELTKNIDKDINSYFDIYHYCTQRVMFDYCKKNNNVVLAKMKDLAHIKSDCDEFSSKHTYPYSSAVLRFMNLPFAYNVPRFKNLSYKKFFDKQ

SEQ ID NO: 294 - protein, 924 aa, Artificial Sequence
  PIG-022_GL0026351 compressed
MAESYKIKSKKTRTKRAGLKSSFVNENKGLMTAFGKGNNAVIEKRISGNLIENVSNKPRFSVEFGNKEYIINDKKLGIVSDDPRESQKPVGEDGIHCKRALEERYFGKTFNDNIHIQLIYSILDLEKILAVHSNNIVYTFDNLRRKETDEYDDFIGYMSTVNSYEEFMNPEKLLPGKDQSVYDNINRSRETFLEYRKNPRLGYFGKVFYEKVTDPKNKSKKKMRLISEKEMYYIFALLGGLRQFCTHDKNRARNWLYSLDTMLNDDAKAVLDKYYVSTVSSLNKHFVDNSAKKDFSIIFNALNITDIELKKNIAKEYYEFVCRKNFKNIGFSIKKLREYLLEKPEFCNLKEDKYNSVRSKLYRLIDFIIYLNYKDAKFENDNDEKIERFVSKLRKCPDEASKETVYQTESDIIKKSIYGSINSIKRGMMSVKSKYGKLELDKQTINQLKRAVDDISINTKGDYFTKLMYLISLLIDGKEINDLLTTLIHQFENIASFIDVMKKENINYEFAEKYKFFNTSKNIACELRTVNSFARMTGFMENDESTKFIMFREAADILGTSYTDDELTDHLNLKKTRLNARSKADTGLRNFIISNVIKSSRFKYLIRYSNPKKVKAIAENKKLVRFVLDKIPDPQIIRYCNTCGFKVGERQENINTLAKAITNFSFSAFEKVKQSANVENDTPDAIDKAQKQGLISLYLTVLYLFIKNMVYVNSRYVLAFHCLERDSQLLKITSGYNNSSYNNLTNYFIDNKYLNPHASRYLKVNISNADEWSIVKFRNGTAHLNSVRNIDTCIEGLKDFKSYFEIYAYTVQKSIKKYFDAEFSEDRNIEDGKISLCNGVYIHERQKNGKPKITVKINPKTIEYMESVDKYGSYTKDFVKALNTPFGYCLARYKNLSIEPLFDRNTVYNKEDVTEEFSVNSKEQ

SEQ ID NO: 295 - protein, 1022 aa, Artificial Sequence
  PIG-046_GL0077813 compressed
MAKKITAKQRREERERQNKQKWAKKQDDATAVFECEANIKPADSKDEDCANTSIKRKKTQAKAMGLKTVLGFDNKIAIASFTSSKDSKSSHIERITDPNGKTIREDVRMFDSNVDECSINLEKRMTVEERQKDGTIKKDEKDVKSTICNPYSNECGKDYIGIKSVAEELFFGRTFPNDNLRVQIAYNIFDIQKIFGTYINNIIYSFYNLSRDEFQSDNDVIGTLYMLKDFDGQKETDTFRQARALLERTEAYYSYFDNVFKKIDKKKKRNDDYEGKRNEILRYNFNVLRVLSFLRQICAHAKVKVSSDNDREKGGVFVDSLDALFNISSFFDAVAPELNEVINSVYSKGIYDINDNFVKNDKNNFYILSKIYPEVARENLLKEYYYFVVSKEGNNIGISTKKLKEAIIAQDMSYIKSKDYDTYRNKLYTVLCFILVKELNERTTIREQMVADLRANMNGDIGREDIYSKYAKIIYAQVKPRFDGMKNVFEEEAKGVIVPDKEEAVKFSNGALDKSEIERFCITSANTDSVAKIIYFLCKFLDGKEINEFCCAMMNKLDGINDLMETAEQCGAKIEFVDNFNVLSKCGTISGQIRVVKSISKMKKEIDVDNETIFLDAFELLGKRIEKYKKDDSGNVLRNDDGKVLRTKEYNNIRKMLCKKDRRLNFIANSIIKNKWFSYIVRYNQPSECQAIMKNKTLVKFALDELPDLQIQRYFVALYGDEDLPSYGEMRKILLKKLHDFSIRDFDEEIGSLFDEMKRKDKFCESDRKKCLFRLYLTIAYLITKSMVKINTRFSIACATYERDYALLCASNKQERAWSSGATALALTRKFLNQDKLIFEKHYAREGEISKLPKEERKAMRKVNDQLLKQTHFSKHSYCYIVDNVNRLTGGECRTDKRVLPVLNEKNDNAGILSDFRKTIAHLNVVHKMVDYVAEIKGITSYYAFFCYVLQRMPVGNKNEKNALKEKYSETAKSYGTYSKDFMWLINLPFAYNLPRYKNLSNEQLFYDEEERNETEGQIDRL

SEQ ID NO: 296 - protein, 1027 aa, Artificial Sequence; identical to SEQ ID NO: 170
  pig_chimera compressed

SEQ ID NO: 297 - protein, 966 aa, Ruminococcus flavefaciens
IEKKKSFAKGMGVKSTLVSGSKVYMTTFAEGSDARLEKIVEGDSIRSVNEGEAFSAEMADKNAGYKIGNAKFSHPKGYAVVANNPLYTGPVQQDMLGLKETLEKRYFGESADGNDNICIQVIHNILDIEKILAEYITNAAYAVNNISGLDKDIIGFGKFSTVYTYDEFKDPEHHRAAFNNNDKLINAIKAQYDEFDNFLDNPRLGYFGQAFFSKEGRNYIINYGNECYDILALLSGLAHWVVANNEEESRISRTWLYNLDKNLDNEYISTLNYLYDRITNELTNSFSKNSAANVNYIAETLGINPAEFAEQYFRFSIMKEQKNLGFNITKLREVMLDRKDMSEIRKNHKVFDSIRTKVYTMMDFVIYRYYIEEDAKVAAANKSLPDNEKSLSEKDIFVINLRGSFNDDQKDALYYDEANRIWRKLENIMHNIKEFRGNKTREYKKKDAPRLPRILPAGRDVSAFSKLMYALTMFLDGKEINDLLTTLINKFDNIQSFLKVMPLIGVNAKFVEEYAFFKDSAKIADELRLIKSFARMGEPIADARRAMYIDAIRILGTNLSYDELKALADTFSLDENGNKLKKGKHGMRNFIINNVISNKRFHYLIRYGDPAHLHEIAKNEAVVKFVLGRIADIQKKQGQNGKNQIDRYYETCIGKDKGKSVSEKVDALTKIITGMNYDQFDKKRSVIEDTGRENAEREKFKKIISLYLTVIYHILKNIVNINARYVIGFHCVERDAQLYKEKGYDINLKKLEEKGFSSVTKLCAGIDETAPDKRKDVEKEMAERAKESIDSLESANPKLYANYIKYSDEKKAEEFTRQINREKAKTALNAYLRNTKWNVIIREDLLRIDNKTCTLFANKAVALEVARYVHAYINDIAEVNSYFQLYHYIMQRIIMNERYEKSSGKVSEYFDAVNDEKKYNDRLLKLLCVPFGYCIPRFKNLSIEALFDRNEAAKFDKEKKKVSGNS

SEQ ID NO: 298 - protein, 966 aa, Artificial Sequence
  CasRx/Cas13d
IEKKKSFAKGMGVKSTLVSGSKVYMTTFAEGSDARLEKIVEGDSIRSVNEGEAFSAEMADKNAGYKIGNAKFSHPKGYAVVANNPLYTGPVQQDMLGLKETLEKRYFGESADGNDNICIQVIHNILDIEKILAEYITNAAYAVNNISGLDKDIIGFGKFSTVYTYDEFKDPEHHRAAFNNNDKLINAIKAQYDEFDNFLDNPRLGYFGQAFFSKEGRNYIINYGNECYDILALLSGLRHWVVHNNEEESRISRTWLYNLDKNLDNEYISTLNYLYDRITNELTNSFSKNSAANVNYIAETLGINPAEFAEQYFRFSIMKEQKNLGFNITKLREVMLDRKDMSEIRKNHKVFDSIRTKVYTMMDFVIYRYYIEEDAKVAAANKSLPDNEKSLSEKDIFVINLRGSFNDDQKDALYYDEANRIWRKLENIMHNIKEFRGNKTREYKKKDAPRLPRILPAGRDVSAFSKLMYALTMFLDGKEINDLLTTLINKFDNIQSFLKVMPLIGVNAKFVEEYAFFKDSAKIADELRLIKSFARMGEPIADARRAMYIDAIRILGTNLSYDELKALADTFSLDENGNKLKKGKHGMRNFIINNVISNKRFHYLIRYGDPAHLHEIAKNEAVVKFVLGRIADIQKKQGQNGKNQIDRYYETCIGKDKGKSVSEKVDALTKIITGMNYDQFDKKRSVIEDTGRENAEREKFKKIISLYLTVIYHILKNIVNINARYVIGFHCVERDAQLYKEKGYDINLKKLEEKGFSSVTKLCAGIDETAPDKRKDVEKEMAERAKESIDSLESANPKLYANYIKYSDEKKAEEFTRQINREKAKTALNAYLRNTKWNVIIREDLLRIDNKTCTLFRNKAVHLEVARYVHAYINDIAEVNSYFQLYHYIMQRIIMNERYEKSSGKVSEYFDAVNDEKKYNDRLLKLLCVPFGYCIPRFKNLSIEALFDRNEAAKFDKEKKKVSGNS

SEQ ID NO: 299 - protein, 877 aa, Artificial Sequence; identical to SEQ ID NO: 153
  Cas13d (contig tpg|DJXD01000002.1

SEQ ID NO: 300 - DNA, 36 bp, Artificial Sequence; identical to SEQ ID NO: 154
  Cas13d (contig tpg|DJXD01000002.1

SEQ ID NO: 301 - protein, 1027 aa, Artificial Sequence; identical to SEQ ID NO: 170
  contig emb|OBLI01020244

SEQ ID NO: 302 - DNA, 30 bp, Artificial Sequence
  CasRx Direct Repeat
aacccctaccaactggtcggggtttgaaac

SEQ ID NO: 303 - protein, 954 aa, Eubacterium siraeum; identical to SEQ ID NO: 1

SEQ ID NO: 304 - protein, 919 aa, Unknown; identical to SEQ ID NO: 3
  Ruminococcus sp.

SEQ ID NO: 305 - protein, 918 aa, Ruminococcus bicirculans; identical to SEQ ID NO: 104

SEQ ID NO: 306 - protein, 922 aa, Unknown; identical to SEQ ID NO: 107
  Ruminococcus sp., isolate 2789STDY5608892 CasM

SEQ ID NO: 307 - protein, 922 aa, Unknown; identical to SEQ ID NO: 109
  Ruminococcus sp. CAG:57 CasM

SEQ ID NO: 308 - protein, 933 aa, Ruminococcus flavefaciens; identical to SEQ ID NO: 62

SEQ ID NO: 309 - protein, 944 aa, Ruminococcus albus; identical to SEQ ID NO: 70

SEQ ID NO: 310 - protein, 967 aa, Ruminococcus flavefaciens; identical to SEQ ID NO: 92

SEQ ID NO: 311 - protein, 796 aa, Unknown
  Ruminococcus sp., isolate 2789STDY5834894 CasM
MEINTSNPTHRSGESSSVRGDMLGLKSELEKRFFGKTFDDNIHIQLIYNILDIEKILAVYVTNIVYALNNMLGVKGSESYDDFMGYLSAQNTYYIFTHPDKSNLSDKVKGNIKKSLSKFNDLLKTKRLGYFGLEEPKTKDKRVSEAYKKRVYHMLAIVGQIRQSVFHDKSNELDEYLYSFIDIIDSEYRDTLDYLVDERFDSINKGFVQGNKVNISLLIDMMKGYEADDIIRLYYDFIVLKSQKNLGFSIKKLREKMLDEYGFRFKDKQYDSVRSKMYKLMDFLLFCNYYRNDVVAGEALVRKLRFSMTDDEKEGIYADEAEKLWGKFRNDFENIADHMNGDVIKELGKADMDFDEKILDSEKKNASDLLYFSKMIYMLTYFLDGKEINDLLTTLISKFDNIKEFLKIMKSSAVDVECELTAGYKLFNDSQRITNELFIVKNIASMRKPAASAKLTMFRDALTILGIDDKITDDRISEILKLKEKGKGIHGLRNFITNNVIESSRFVYLIKYANAQKIREVAKNEKVVMFVLGGIPDTQIERYYKSCVEFPDMNSSLEAKCSELARMIKNISFDDFKNVKQQAKGRENVAKERAKAVIGLYLTVMYLLVKNLVNVNARYVIAIHCLERDFGLYKEIIPELASKNLKNDYRILSQTLCELCDDRDESPNLFLKKNKRLRKCVEVDINNADSSMTRKYRNCIAHLTVVRELKEYIGDIRTVDSYFSIYHYVMQRCITKREDDTKQEEKIKYEDDLLKNHGYTKDFVKALNSPFGYNIPRFKNLSIEQLFDRNEYLTEK

SEQ ID NO: 312 - protein, 412 aa, Artificial Sequence
  RtcB homolog
MIVLEIIGERNTAVVYGEIIDECAVSQIEEICNHPAFENSRIRIMPDCHAGKGCVIGFTCVTSNRMIVPNIVGVDIGCGILTTVFTADREIDYRALDTFIRSNIPSGMEIHDSVSDTVAENTALIAKVNGICDAIGESADVDYHLRSIGTLGGGNHFIEIDRLNNGNYALTVHTGSRNLGKRICGYFQSNASVIDTELRRSILLRHRSATTSEEHEEIDRRAAQIAPVSKELAFITGERYDSYIGCMLDAKALAAFNRTVISDRIMSFLADEYGVEIKDRFDTVHNYIDWYDDTHTSVVIRKGAISARKGERIVIPLNMRDGIIIAHGRGNEEWNCSAPHGSGRAYSRSDARRTFTLEEYVEEMDGVNTWSVSESTIDECPMAYKPSEMIIGSIGDTVEIESIAHTVYNFKA

SEQ ID NO: 313 - protein, 831 aa, Artificial Sequence
  WYL Eubacterium siraeum + C-term NLS
MKKTEKFDDVQSGYEYKYFLESIDKYRAAVQNIYTYGCFNQKQLSEQCNCSDQTIKKAFNFYNLCLANYIKKKKGTLSKKAKGRPTEAKYLEYDRFTLNENYLYNIYLWARITKKQMWAFSYFRRHTSLLINASRTEIKNQLSDFFLYFSEYMDRSKKAENSQDLGYIIDMTAPTEKNMLISSMCDALAVFGRKAPYSVPAYSISHKLKKLCGNDSKSLWSFMYDNYDRILYDEAVYTIRQAIRDRKLIGYQTVGTEKQKSVNYVVPLKIMYEYNLGRCYLLYSPLNSDSIIKSIRLDKLYKVAAYEPDSIINYEKLYDVLAVAENEIWLSGDYTKKDCLSRIVLKNVKPQAFSLIEKYGVCYTEDREAKTVTFNIRKADDIKPFIRTLGGDAVISEEDNPGLFREFAYDARIGRQMYYDDSFADCPAEKDSQPAKDSKTASGNDNIKKYASYPTLRLFNKYGSFMNILAEELAEHIFSEIIRMPVEKRAGQIEYSSNRLERVLNSYFKIYGFDELRTEASNITEWFTKATEELSDSDYSSWFSVNGGKFEAVADLNEYEHKQLLTNIEYEYLRLMLGDPDARAIIGNEYCEKLSEYVGSADTTLDEFFTVRYANRNEKTIENKHSVLRTIMRAMNNEKKADIEYKGKHYICSAYRFTYSLRERKHRLMVFDGNYIMQINLCDIKDAQMTKEPSLSDEEMNKLLTERKKYIEIAIPQNADAQQRNVFERALRLFGGFERYSWNDAKNGEYVIAVAYYEPDISVSSSADRRIYRRDTVAADIMSLGRYARVMKQPGFELDGVRYDSSLYDYISKNYSGTAARYEKPKKKRKV

SEQ ID NO: 314 - protein, 396 aa, Artificial Sequence
  WYL Ruminococcus sp.isolate 2789STDY5834971 + C-term  NLS
MLILPSTFLPKRDKNVPYIAEVQSIPLSPSAYSVIIKDKSIFETSLSPNGSVSMSSFLTSIFDSAYIASLKYKSEKYNGIPLLNAFVKWQIEEINDGLDDKSKEIIKSYLISKLSAKYEKTKTENAVRVRLSICRDLYDTLSSDDLYYENKVYSSTLRRFLKAVYEDYALLSDCERERLIFADNIIKINEVIKQNGSRYYSFIYAYSNMYSREKRRIRLIPYRIVSDEYKMYNYLVCLSDEKSAGKEFKADSYRISRLSGLSIAEKLSQKEYSSVTEYERLKEGHVKSVKHLLSDPRFGSDESDISKVYLTEKGVEMFGKILYQRPILKGNEKPKPNAVNEFISPPIQVKYYFNKFGKDGVILSPSDSFEEMRTLYVEGAEAYNREVEMPKKKRKV

SEQ ID NO: 315 - protein, 399 aa, Artificial Sequence
  WYL Ruminococcus bicirculans + C-term NLS
MSMTPSTFLPKREDGVPYIAEVQSIPLSPSAYSVIIKDKSIFETSLSPNGSVSMSSFLTSIFDSAYIASLKYKSDDNYKYIGIPLLNAFVKWQIEEIDDSLDDKSKEIIKSYLISKLSAKYEKTKTENAVRVRLSICRDLYDTLSSDDLYYENKVYSSTLRRFLKAVYEDYALLSDCERERLIFADNIIKINEVIKQNGSRYYSFIYAYSNMYSREKRRIRLIPYRIVSDEYKMYNYLVCLSDEKSAGKEFKADSYRISRLSGLSIAEKLSQKEYSSVTEYERLKEGHVKSVKHLLSDPRFGSDESDISKVYLTEKGVEMFGKILYQRPILKGNEKPKPNAVNEFISPPIQVKYYFNKFGKDGVILSPSDSFEEMRTLYVEGAEAYNREVEMPKKKRKV

SEQ ID NO: 316 - protein, 399 aa, Artificial Sequence
  WYL Ruminococcus sp. isolate 2789STDY5608892 + C-term NLS
MLIPPSTFLPKRDKNVPYIAEVQSIPLSPSAYSVIIKDKSIFETSLSPNGSVSMSSFLTSIFDSAYIASLKYKSDDNYKYIGIPLLNAFVEWQIEEIDDSLDDKSKEIIKSYLISKLSAKYEKTKTENAVRVRLSICRDLYDTLSSDDLYYENKVYSLTLRRFLKAVYEDYALLSDCERERLIFADNIIKINEVIKQNGSRYYSFIYAYSNMYSREKRRIRLIPYRIVSDEYKMYNYLVCLSDEKSAGKEFKADSYRISRLSGLSIAEKLSQKEYSSVTEYERLKEGHVKSVKHLLSDPRFGSDESDISKVYLTEKGVEMFGKILYQRPILKGNEKPKPNTVNEFISPPIQVKYYFNKFGKDGVILSPSDSFEEMRTLYVEGAEAYNREVEMPKKKRKV

SEQ ID NO: 317 - protein, 399 aa, Artificial Sequence; identical to SEQ ID NO: 316
  WYL Ruminococcus sp. CAG:57 + C-term NLS

SEQ ID NO: 318 - protein, 287 aa, Artificial Sequence
  WYL Ruminococcus flavefaciens FD-1 + C-term NLS
MIIAINQWKRRFSLVIYGKSEGETIVKIKLLLISLAYLISIYLLCSPGCIGIFTHGMLTTVIGVVTMLAATGTYGMYLYSSAIGERSLPEIPMNKETEYSRYKELENWFRAFRYLDRNNNFAMLSSDLATSYHDGLIRDNPFRNTELGDRLQTTSSDISIKYDQTLKILSESFEKNDITYQNYLSVLDNVLKLSSSHLKAIKKRVCVFDYRTWADNKNDEMCRKYIEEVKSSVIRLEEIEGKFDNLLHELICLSEISEDPLLEMQDLIETTSDYKSIEDQPKKKRKV

SEQ ID NO: 319 - protein, 233 aa, Artificial Sequence
  WYL Ruminococcus albus strain KH2T6 + C-term NLS
MCTWYYAEAKSLSFFIDKASQLPLSDIIMNTMSKSKAMSGNIRPTDMAAVLAPNKQGNVAVFPMIWGFTHESTSKPVINCRIESADTKPLWKDSWYRRRCVIPASWYYEWGVPPSEGELYHKNEYNKIQKEKYAIQPEGAEITYLAGLYRFEEHRGVQVPMFAVITRESVEPVSSIHDRMPLILGKDSLSEWIHPNGDPNKIAKTALTKMVMEKAIDYPEPEPSFMPKKKRKV

SEQ ID NO: 320 - protein, 321 aa, Artificial Sequence
  WYL Ruminococcus flavefaciens strain XPD3002 + C-term NLS
MELFNEYRNKSLRAFLKLAERISYGEELSIDEFEAEYYRLSGDNKKITSVFYKNTLYNDKLPIFDTREGKVRLFGEPDKCSNKHISDTLLKSEITWLHNALNDKLSKLFLSDEERISIDAKLSDYTEYYKNIDDMWRSNEDISEEVEKNFKIILKAINEKQALSYTFKNKNCEGFPVRIEYDERTCRIYMIIYDGNRFVKSDISKLSDIYITENSIDTIPEIKDDMLNKKAYLPVVFTVTDDKNRKAIDRALLAFSVYDHVVEPIDEKTARFTIQYYTMDLDLLIKDILAFGSDIKVESPRYVVKRITDILRKVPKKKRKV

SEQ ID NO: 321 - protein, 419 aa, Artificial Sequence
  RtcB Eubacterium siraeum + C-term NLS
MIVLEIIGERNTAVVYGEIIDECAVSQIEEICNHPAFENSRIRIMPDCHAGKGCVIGFTCVTSNRMIVPNIVGVDIGCGILTTVFTADREIDYRALDTFIRSNIPSGMEIHDSVSDTVAENTALIAKVNGICDAIGESADVDYHLRSIGTLGGGNHFIEIDRLNNGNYALTVHTGSRNLGKRICGYFQSNASVIDTELRRSILLRHRSATTSEEHEEIDRRAAQIAPVSKELAFITGERYDSYIGCMLDAKALAAFNRTVISDRIMSFLADEYGVEIKDRFDTVHNYIDWYDDTHTSVVIRKGAISARKGERIVIPLNMRDGIIIAHGRGNEEWNCSAPHGSGRAYSRSDARRTFTLEEYVEEMDGVNTWSVSESTIDECPMAYKPSEMIIGSIGDTVEIESIAHTVYNFKAPKKKRKV

SEQ ID NO: 322 - DNA, 30 bp, Artificial Sequence
  CasRx Direct Repeat
tacccctaccaactggtcggggtttgaaac

SEQ ID NO: 323-324 - skipped (2 entries)

SEQ ID NO: 325 - protein, 128 aa, Artificial Sequence
  RNAse1
KESRAKKFQRQHMDSDSSPSSSSTYCNQMMRRRNMTQGLCKPVNTFVHEPLVDVQNVCFQEKVTCKNGQGNCYKSNSSMHITDCRLTNGSRYPNCAYRTSPKERHIIVACEGSPYVPVHFDASVEDST

SEQ ID NO: 326 - protein, 119 aa, Artificial Sequence
  RNAse4
QDGMYQRFLRQHVHPEETGGSDRYCDLMMQRRKMTLYHCKRFNTFIHEDIWNIRSICSTTNIQCKNGKMNCHEGVVKVTDCRDTGSSRAPNCRYRAIASTRRVVIACEGNPQVPVHFDG

SEQ ID NO: 327 - protein, 127 aa, Artificial Sequence
  RNAse6
WPKRLTKAHWFEIQHIQPSPLQCNRAMSGINNYTQHCKHQNTFLHDSFQNVAAVCDLLSIVCKNRRHNCHQSSKPVNMTDCRLTSGKYPQCRYSAAAQYKFFIVACDPPQKSDPPYKLVPVHLDSIL

SEQ ID NO: 328 - protein, 155 aa, Artificial Sequence
  RNAse7
APARAGFCPLLLLLLLGLWVAEIPVSAKPKGMTSSQWFKIQHMQPSPQACNSAMKNINKHTKRCKDLNTFLHEPFSSVAATCQTPKIACKNGDKNCHQSHGPVSLTMCKLTSGKYPNCRYKEKRQNKSYVVACKPPQKKDSQQFHLVPVHLDRVL

SEQ ID NO: 329 - protein, 122 aa, Artificial Sequence
  RNAse8
TSSQWFKTQHVQPSPQACNSAMSIINKYTERCKDLNTFLHEPFSSVAITCQTPNIACKNSCKNCHQSHGPMSLTMGELTSGKYPNCRYKEKHLNTPYIVACDPPQQGDPGYPLVPVHLDKVV

SEQ ID NO: 330 - protein, 134 aa, Artificial Sequence
  RNAse2
KPPQFTWAQWFETQHINMTSQQCTNAMQVINNYQRRCKNQNTFLLTTFANVVNVCGNPNMTCPSNKTRKNCHHSGSQVPLIHCNLTTPSPQNISNCRYAQTPANMFYIVACDNRDQRRDPPQYPVVPVHLDRII

SEQ ID NO: 331 - protein, 216 aa, Artificial Sequence
  RNAse6PL
DKRLRDNHEWKKLIMVQHWPETVCEKIQNDCRDPPDYWTIHGLWPDKSEGCNRSWPFNLEEIKKNWMEITDSSLPSPSMGPAPPRWMRSTPRRSTLAEAWNSTGSWTSTGGCALPPAALPSGDLCCRPSLTAGSRGVGVDLTALHQLLHVHYSATGIIPEECSEPTKPFQIILHHDHTEWVQSIGMPIWGTISSSESAIGKNEESQPACAVLSHDS

SEQ ID NO: 332 - protein, 722 aa, Artificial Sequence
  RNAseL
AAVEDNHLLIKAVQNEDVDLVQQLLEGGANVNFQEEEGGWTPLHNAVQMSREDIVELLLRHGADPVLRKKNGATPFILAAIAGSVKDLLKLFLSKGADVNECDFYGFTAFMEAAVYGKVKALKFLYKRGANVNLRRKTKEDQERLRKGGATALMDAAEKGHVEVLKILLDEMGADVNACDNMGRNALIHALLSSDDSDVEAITHLLLDHGADVNVRGERGKTPLILAVEKKHLGLVQRLLEQEHIEINDTDSDGKTALLLAVELKLKKIAELLCKRGASTDCGDLVMTARRNYDHSLVKVLLSHGAKEDFHPPAEDWKPQSSHWGAALKDLHRIYRPMIGKLKFFIDEKYKIADTSEGGIYLGFYEKQEVAVKTFCEGSPRAQREVSCLQSSRENSHLVTFYGSESHRGHLFVCVTLCEQTLEACLDVHRGEDVENEEDEFARNVLSSIFKAVQELHLSCGYTHQDLQPQNILIDSKKAAHLADFDKSIKWAGDPQEVKRDLEDLGRLVLYVVKKGSISFEDLKAQSNEEVVQLSPDEETKDLIHRLFHPGEHVRDCLSDLLGHPFFWTWESRYRTLRNVGNESDIKTRKSESEILRLLQPGPSEHSKSFDKWTTKINECVMKKMNKFYEKRGNFYQNTVGDLLKFIRNLGEHIDEEKHKKMKLKIGDPSLYFQKTFPDLVIYVYTKLQNTEYRKHFPQTHSPNKPQCDGAGGASGLASPGC

SEQ ID NO: 333 - protein, 217 aa, Artificial Sequence
  RNAseT2
VQHWPETVCEKIQNDCRDPPDYWTIHGLWPDKSEGCNRSWPFNLEEIKDLLPEMRAYWPDVIHSFPNRSRFWKHEWEKHGTCAAQVDALNSQKKYFGRSLELYRELDLNSVLLKLGIKPSINYYQVADFKDALARVYGVIPKIQCLPPSQDEEVQTIGQIELCLTKQDQQLQNCTEPGEQPSPKQEVWLANGAAESRGLRVCEDGPVFYPPPKKTKH

SEQ ID NO: 334 - protein, 183 aa, Artificial Sequence
  RNAse11
EASESTMKIIKEEFTDEEMQYDMAKSGQEKQTIEILMNPILLVKNTSLSMSKDDMSSTLLTFRSLHYNDPKGNSSGNDKECCNDMTVWRKVSEANGSCKWSNNFIRSSTEVMRRVHRAPSCKFVQNPGISCCESLELENTVCQFTTGKQFPRCQYHSVTSLEKILTVLTGHSLMSWLVCGSKL

SEQ ID NO: 335 - protein, 185 aa, Artificial Sequence
  RNAseT2-like
  SITE (1)..(1): Xaa can be any naturally occurring amino acid
XLGGADKRLRDNHEWKKLIMVQHWPETVCEKIQNDCRDPPDYWTIHGLWPDKSEGCNRSWPFNLEEIKDLLPEMRAYWPDVIHSFPNRSRFWKHEWEKHGTCAAQVDALNSQKKYFGRSLELYRELDLNSVLLKLGIKPSINYYQTTEEDLNLDVEPTTEDTAEEVTIHVLLHSALFGEIGPRRW

SEQ ID NO: 336 - protein, 128 aa, Artificial Sequence
  RNase1(K41R)
KESRAKKFQRQHMDSDSSPSSSSTYCNQMMRRRNMTQGRCRPVNTFVHEPLVDVQNVCFQEKVTCKNGQGNCYKSNSSMHITDCRLTNGSRYPNCAYRTSPKERHIIVACEGSPYVPVHFDASVEDST

SEQ ID NO: 337 - protein, 128 aa, Artificial Sequence
  RNase1 (RNase1(K41R, D121E))
KESRAKKFQRQHMDSDSSPSSSSTYCNQMMRRRNMTQGRCRPVNTFVHEPLVDVQNVCFQEKVTCKNGQGNCYKSNSSMHITDCRLTNGSRYPNCAYRTSPKERHIIVACEGSPYVPVHFEASVEDST

SEQ ID NO: 338 - protein, 128 aa, Artificial Sequence
  RNase1 (RNase1(K41R, D121E, H119N))
KESRAKKFQRQHMDSDSSPSSSSTYCNQMMRRRNMTQGRCRPVNTFVHEPLVDVQNVCFQEKVTCKNGQGNCYKSNSSMHITDCRLTNGSRYPNCAYRTSPKERHIIVACEGSPYVPVNFEASVEDST

SEQ ID NO: 339 - protein, 128 aa, Artificial Sequence
  (RNase1(H119N))
KESRAKKFQRQHMDSDSSPSSSSTYCNQMMRRRNMTQGRCKPVNTFVHEPLVDVQNVCFQEKVTCKNGQGNCYKSNSSMHITDCRLTNGSRYPNCAYRTSPKERHIIVACEGSPYVPVNFDASVEDST

SEQ ID NO: 340 - protein, 128 aa, Artificial Sequence
  (RNase1(R39D, N67D, N88A, G89D, R91D, H119N))
KESRAKKFQRQHMDSDSSPSSSSTYCNQMMRRRNMTQGDCKPVNTFVHEPLVDVQNVCFQEKVTCKDGQGNCYKSNSSMHITDCRLTADSDYPNCAYRTSPKERHIIVACEGSPYVPVNFDASVEDST

SEQ ID NO: 341 - protein, 128 aa, Artificial Sequence
  RNase1 (RNase1(R39D, N67D, N88A, G89D, R91D, H119N, K41R, D121E))
KESRAKKFQRQHMDSDSSPSSSSTYCNQMMRRRNMTQGDCRPVNTFVHEPLVDVQNVCFQEKVTCKDGQGNCYKSNSSMHITDCRLTADSDYPNCAYRTSPKERHIIVACEGSPYVPVNFEASVEDST

SEQ ID NO: 342 - protein, 128 aa, Artificial Sequence
  RNase1 (RNase1(R39D, N67D, N88A, G89D, R91D))
KESRAKKFQRQHMDSDSSPSSSSTYCNQMMRRRNMTQGDCKPVNTFVHEPLVDVQNVCFQEKVTCKDGQGNCYKSNSSMHITDCRLTADSDYPNCAYRTSPKERHIIVACEGSPYVPVHFDASVEDST

SEQ ID NO: 343 - protein, 128 aa, Artificial Sequence; identical to SEQ ID NO: 341
  Rnase1 (R39D, N67D, N88A, G89D, R91D, H119N, K41R, D121E)

SEQ ID NO: 344 - protein, 299 aa, Artificial Sequence
  NOB1
APVEHVVADAGAFLRHAALQDIGKNIYTIREVVTEIRDKATRRRLAVLPYELRFKEPLPEYVRLVTEFSKKTGDYPSLSATDIQVLALTYQLEAEFVGVSHLKQEPQKVKVSSSIQHPETPLHISGFHLPYKPKPPQETEKGHSACEPENLEFSSFMFWRNPLPNIDHELQELLIDRGEDVPSEEEEEEENGFEDRKDDSDDDGGGWITPSNIKQIQQELEQCDVPEDVRVGCLTTDFAMQNVLLQMGLHVLAVNGMLIREARSYILRCHGCFKTTSDMSRVFCSHCGNKTLKKVSVTV

SEQ ID NO: 345 - protein, 210 aa, Artificial Sequence
  ENDOV
AFSGLQRVGGVDVSFVKGDSVRACASLVVLSFPELEVVYEESRMVSLTAPYVSGFLAFREVPFLLELVQQLREKEPGLMPQVLLVDGNGVLHHRGFGVACHLGVLTDLPCVGVAKKLLQVDGLENNALHKEKIRLLQTRGDSFPLLGDSGTVLGMALRSHDRSTRPLYISVGHRMSLEAAVRLTCCCCRFRIPEPVRQADICSREHIRKS

SEQ ID NO: 346 - protein, 249 aa, Artificial Sequence
  ENDOG
AELPPVPGGPRGPGELAKYGLPGLAQLKSRESYVLCYDPRTRGALWVVEQLRPERLRGDGDRRECDFREDDSVHAYHRATNADYRGSGFDRGHLAAAANHRWSQKAMDDTFYLSNVAPQVPHLNQNAWNNLEKYSRSLTRSYQNVYVCTGPLFLPRTEADGKSYVKYQVIGKNHVAVPTHFFKVLILEAAGGQIELRTYVMPNAPVDEAIPLERFLVPIESIERASGLLFVPNILARAGSLKAITAGSK

SEQ ID NO: 347 - protein, 479 aa, Artificial Sequence
  ENDOD1
RLVGEEEAGFGECDKFFYAGTPPAGLAADSHVKICQRAEGAERFATLYSTRDRIPVYSAFRAPRPAPGGAEQRWLVEPQIDDPNSNLEEAINEAEAITSVNSLGSKQALNTDYLDSDYQRGQLYPFSLSSDVQVATFTLTNSAPMTQSFQERWYVNLHSLMDRALTPQCGSGEDLYILTGTVPSDYRVKDKVAVPEFVWLAACCAVPGGGWAMGFVKHTRDSDIIEDVMVKDLQKLLPFNPQLFQNNCGETEQDTEKMKKILEVVNQIQDEERMVQSQKSSSPLSSTRSKRSTLLPPEASEGSSSFLGKLMGFIATPFIKLFQLIYYLVVAILKNIVYFLWCVTKQVINGIESCLYRLGSATISYFMAIGEELVSIPWKVLKVVAKVIRALLRILCCLLKAICRVLSIPVRVLVDVATFPVYTMGAIPIVCKDIALGLGGTVSLLFDTAFGTLGGLFQVVFSVCKRIGYKVTFDNSGEL

SEQ ID NO: 348 - protein, 380 aa, Artificial Sequence
  hFEN1
MGIQGLAKLIADVAPSAIRENDIKSYFGRKVAIDASMSIYQFLIAVRQGGDVLQNEEGETTSHLMGMFYRTIRMMENGIKPVYVFDGKPPQLKSGELAKRSERRAEAEKQLQQAQAAGAEQEVEKFTKRLVKVTKQHNDECKHLLSLMGIPYLDAPSEAEASCAALVKAGKVYAAATEDMDCLTFGSPVLMRHLTASEAKKLPIQEFHLSRILQELGLNQEQFVDLCILLGSDYCESIRGIGPKRAVDLIQKHKSIEEIVRRLDPNKYPVPENWLHKEAHQLFLEPEVLDPESVELKWSEPNEEELIKFMCGEKQFSEERIRSGVKRLSKSRQGSTQGRLDDFFKVTGSLSSAKRKEPEPKGSTKKKAKTGAAGKFKRGK

SEQ ID NO: 349 - protein, 372 aa, Homo sapiens
MESGQPARRIAMAPLLEYERQLVLELLDTDGLVVCARGLGADRLLYHFLQLHCHPACLVLVLNTQPAEEEYFINQLKIEGVEHLPRRVTNEITSNSRYEVYTQGGVIFATSRILVVDFLTDRIPSDLITGILVYRAHRIIESCQEAFILRLFRQKNKRGFIKAFTDNAVAFDTGFCHVERVMRNLFVRKLYLWPRFHVAVNSFLEQHKPEVVEIHVSMTPTMLAIQTAILDILNACLKELKCHNPSLEVEDLSLENAIGKPFDKTIRHYLDPLWHQLGAKTKSLVQDLKILRTLLQYLSQYDCVTFLNLLESLRATEKAFGQNSGWLFLDSSTSMFINARARVYHLPDAKMSKKEKISEKMEIKEGEGILWG

SEQ ID NO: 350 - protein, 311 aa, Homo sapiens
CSPQESGMTALSARMLTRSRSLGPGAGPRGCREEPGPLRRREAAAEARKSHSPVKRPRKAQRLRVAYEGSDSEKGEGAEPLKVPVWEPQDWQQQLVNIRAMRNKKDAPVDHLGTEHCYDSSAPPKVRRYQVLLSLMLSSQTKDQVTAGAMQRLRARGLTVDSILQTDDATLGKLIYPVGFWRSKVKYIKQTSAILQQHYGGDIPASVAELVALPGVGPKMAHLAMAVAWGTVSGIAVDTHVHRIANRLRWTKKATKSPEETRAALEEWLPRELWHEINGLLVGFGQQTCLPVHPRCHACLNQALCPAAQGL

SEQ ID NO: 351 - protein, 186 aa, Homo sapiens
ESTHVEFKRFTTKKVIPRIKEMLPHYVSAFANTQGGYVLIGVDDKSKEVVGCKWEKVNPDLLKKEIENCIEKLPTFHFCCEKPKVNFTTKILNVYQKDVLDGYVCVIQVEPFCCVVFAEAPDSWIMKDNSVTRLTAEQWVVMMLDTQSAPPSLVTDYNSCLISSASSARKSPGYPIKVHKFKEALQ

SEQ ID NO: 352 - protein, 262 aa, Homo sapiens
TLQGTNTYLVGTGPRRILIDTGEPAIPEYISCLKQALTEFNTAIQEIVVTHWHRDHSGGIGDICKSINNDTTYCIKKLPRNPQREEIIGNGEQQYVYLKDGDVIKTEGATLRVLYTPGHTDDHMALLLEEENAIFSGDCILGEGTTVFEDLYDYMNSLKELLKIKADIIYPGHGPVIHNAEAKIQQYISHRNIREQQILTLFRENFEKSFTVMELVKIIYKNTPENLHEMAKHNLLLHLKKLEKEGKIFSNTDPDKKWKAHL

SEQ ID NO: 353 - protein, 518 aa, Homo sapiens
MLRVVSWNINGIRRPLQGVANQEPSNCAAVAVGRILDELDADIVCLQETKVTRDALTEPLAIVEGYNSYFSFSRNRSGYSGVATFCKDNATPVAAEEGLSGLFATQNGDVGCYGNMDEFTQEELRALDSEGRALLTQHKIRTWEGKEKTLTLINVYCPHADPGRPERLVFKMRFYRLLQIRAEALLAAGSHVIILGDLNTAHRPIDHWDAVNLECFEEDPGRKWMDSLLSNLGCQSASHVGPFIDSYRCFQPKQEGAFTCWSAVTGARHLNYGSRLDYVLGDRTLVIDTFQASFLLPEVMGSDHCPVGAVLSVSSVPAKQCPPLCTRFLPEFAGTQLKILRFLVPLEQSPVLEQSTLQHNNQTRVQTCQNKAQVRSTRPQPSQVGSSRGQKNLKSYFQPSPSCPQASPDIELPSLPLMSALMTPKTPEEKAVAKVVKGQAKTSEAKDEKELRTSFWKSVLAGPLRTPLCGGHREPCVMRTVKKPGPNLGRRFYMCARPRGPPTDPSSRCNFFLWSRPS

SEQ ID NO: 354 - protein, 350 aa, Homo sapiens
MLRVVSWNINGIRRPLQGVANQEPSNCAAVAVGRILDELDADIVCLQETKVTRDALTEPLAIVEGYNSYFSFSRNRSGYSGVATFCKDNATPVAAEEGLSGLFATQNGDVGCYGNMDEFTQEELRALDSEGRALLTQHKIRTWEGKEKTLTLINVYCPHADPGRPERLVFKMRFYRLLQIRAEALLAAGSHVIILGDLNTAHRPIDHWDAVNLECFEEDPGRKWMDSLLSNLGCQSASHVGPFIDSYRCFQPKQEGAFTCWSAVTGARHLNYGSRLDYVLGDRTLVIDTFQASFLLPEVMGSDHCPVGAVLSVSSVPAKQCPPLCTRFLPEFAGTQLKILRFLVPLEQSP

SEQ ID NO: 355 - protein, 287 aa, Homo sapiens
PKRGKKGAVAEDGDELRTEPEAKKSKTAAKKNDKEAAGEGPALYEDPPDQKTSPSGKPATLKICSWNVDGLRAWIKKKGLDWVKEEAPDILCLQETKCSENKLPAELQELPGLSHQYWSAPSDKEGYSGVGLLSRQCPLKVSYGIGDEEHDQEGRVIVAEFDSFVLVTAYVPNAGRGLVRLEYRQRWDEAFRKFLKGLASRKPLVLCGDLNVAHEEIDLRNPKGNKKNAGFTPQERQGFGELLQAVPLADSFRHLYPNTPYAYTFWTYMMNARSKNVGWRLDYFLLS

SEQ ID NO: 356 - protein, 123 aa, Homo sapiens [sequence omitted]

SEQ ID NO: 357 - protein, 136 aa, Homo sapiens
SSLIRRVISTAKAPGAIGPYSQAVLVDRTIYISGQIGMDPSSGQLVSGGVAEEAKQALKNMGEILKAAGCDFTNVVKTTVLLADINDFNTVNEIYKQYFKSNFPARAAYQVAALPKGSRIEIEAVAIQGPLTTASL

SEQ ID NO: 358 - protein, 189 aa, Homo sapiens
GGGTPKAPNLEPPLPEEEKEGSDLRPVVIDGSNVAMSHGNKEVFSCRGILLAVNWFLERGHTDITVFVPSWRKEQPRPDVPITDQHILRELEKKKILVFTPSRRVGGKRVVCYDDRFIVKLAYESDGIVVSNDTYRDLQGERQEWKRFIEERLLMYSFVNDKFMPPDDPLGRHGPSLDNFLRKKPLTLE

SEQ ID NO: 359 - protein, 598 aa, Homo sapiens
SGPCGEKPVLEASPTMSLWEFEDSHSRQGTPRPGQELAAEEASALELQMKVDFFRKLGYSSTEIHSVLQKLGVQADTNTVLGELVKHGTATERERQTSPDPCPQLPLVPRGGGTPKAPNLEPPLPEEEKEGSDLRPVVIDGSNVAMSHGNKEVFSCRGILLAVNWFLERGHTDITVFVPSWRKEQPRPDVPITDQHILRELEKKKILVFTPSRRVGGKRVVCYDDRFIVKLAYESDGIVVSNDTYRDLQGERQEWKRFIEERLLMYSFVNDKFMPPDDPLGRHGPSLDNFLRKKPLTLEHRKQPCPYGRKCTYGIKCRFFHPERPSCPQRSVADELRANALLSPPRAPSKDKNGRRPSPSSQSSSLLTESEQCSLDGKKLGAQASPGSRQEGLTQTYAPSGRSLAPSGGSGSSFGPTDWLPQTLDSLPYVSQDCLDSGIGSLESQMSELWGVRGGGPGEPGPPRAPYTGYSPYGSELPATAAFSAFGRAMGAGHFSVPADYPPAPPAFPPREYWSEPYPLPPPTSVLQEPPVQSPGAGRSPWGRAGSLAKEQASVYTKLCGVFPPHLVEAVMGRFPQLLDPQQLAAEILSYKSQHPSE

SEQ ID NO: 360 - protein, 136 aa, Homo sapiens; identical to SEQ ID NO: 357

SEQ ID NO: 361 - protein, 213 aa, Homo sapiens
EALFFPSQVTCTEALLRAPGAELAELPEGCPCGLPHGESALSRLLRALLAARASLDLCLFAFSSPQLGRAVQLLHQRGVRVRVVTDCDYMALNGSQIGLLRKAGIQVRHDQDPGYMHHKFAIVDKRVLITGSLNWTTQAIQNNRENVLITEDDEYVRLFLEEFERIWEQFNPTKYTFFPPKKSHGSCAPPVSRAGGRLLSWHRTCGTSSESQT

SEQ ID NO: 362 - protein, 382 aa, Homo sapiens
KARYKTLEPRGYSLLIRGLIHSDRWREALLLLEDIKKVITPSKKNYNDCIQGALLHQDVNTAWNLYQELLGHDIVPMLETLKAFFDFGKDIKDDNYSNKLLDILSYLRNNQLYPGESFAHSIKTWFESVPGKQWKGQFTTVRKSGQCSGCGKTIESIQLSPEEYECLKGKIMRDVIDGGDQYRKTTPQELKRFENFIKSRPPFDVVIDGLNVAKMFPKVRESQLLLNVVSQLAKRNLRLLVLGRKHMLRRSSQWSRDEMEEVQKQASCFFADDISEDDPFLLYATLHSGNHCRFITRDLMRDHKACLPDAKTQRLFFKWQQGHQLAIVNRFPGSKLTFQRILSYDTVVQTTGDSWHIPYDEDLVERCSCEVPTKWLCLHQKT

SEQ ID NO: 363 - protein, 360 aa, Homo sapiens
SVEPMFRHLKNTYAGLQLVVVILPGKTPVYAEVKRVGDTVLGMATQCVQMKNVQRTTPQTLSNLCLKINVKLGGVNNILLPQGRPPVFQQPVIFLGADVTHPPAGDGKKPSIAAVVGSMDAHPNRYCATVRVQQHRQEIIQDLAAMVRELLIQFYKSTRFKPTRIIFYRDGVSEGQFQQVLHHELLAIREACIKLEKDYQPGITFIVVQKRHHTRLFCTDKNERVGKSGNIPAGTTVDTKITHPTEFDFYLCSHAGIQGTSRPSHYHVLWDDNRFSSDELQILTYQLCHTYVRCTRSVSIPAPAYYAHLVAFRARYHLVDKEHDSAEGSHTSGQSNGRDHQALAKAVQVHQDTLRTMYFA

SEQ ID NO: 364 - protein, 327 aa, Homo sapiens
QGAEGALTGKQPDGSAEKAVLEQFGFPLTGTEARCYTNHALSYDQAKRVPRWVLEHISKSKIMGDADRKHCKFKPDPNIPPTFSAFNEDYVGSGWSRGHMAPAGNNKFSSKAMAETFYLSNIVPQDFDNNSGYWNRIEMYCRELTERFEDVWVVSGPLTLPQTRGDGKKIVSYQVIGEDNVAVPSHLYKVILARRSSVSTEPLALGAFVVPNEAIGFQPQLTEFQVSLQDLEKLSGLVFFPHLDRTSDIRNICSVDTCKLLDFQEFTLYLSTRKIEGARSVLRLEKIMENLKNAEIEPDDYFMSRYEKKLEELKAKEQSGTQIRKPS

SEQ ID NO: 365 - protein, 526 aa, Homo sapiens
EHPSKMEFFQKLGYDREDVLRVLGKLGEGALVNDVLQELIRTGSRPGALEHPAAPRLVPRGSCGVPDSAQRGPGTALEEDFRTLASSLRPIVIDGSNVAMSHGNKETFSCRGIKLAVDWFRDRGHTYIKVFVPSWRKDPPRADTPIREQHVLAELERQAVLVYTPSRKVHGKRLVCYDDRYIVKVAYEQDGVIVSNDNYRDLQSENPEWKWFIEQRLLMFSFVNDRFMPPDDPLGRHGPSLSNFLSRKPKPPEPSWQHCPYGKKCTYGIKCKFYHPERPHHAQLAVADELRAKTGARPGAGAEEQRPPRAPGGSAGARAAPREPFAHSLPPARGSPDLAALRGSFSRLAFSDDLGPLGPPLPVPACSLTPRLGGPDWVSAGGRVPGPLSLPSPESQFSPGDLPPPPGLQLQPRGEHRPRDLHGDLLSPRRPPDDPWARPPRSDRFPGRSVWAEPAWGDGATGGLSVYATEDDEGDARARARIALYSVFPRDQVDRVMAAFPELSDLARLILLVQRCQSAGAPLGKP

SEQ ID NO: 366 - protein, 475 aa, Homo sapiens
RQQQPQVVEKQQETPLAPADFAHISQDAQSLHSGASRRSQKRLQSPSKQAQPLDDPEAEQLTVVGKISFNPKDVLGRGAGGTFVFRGQFEGRAVAVKRLLRECFGLVRREVQLLQESDRHPNVLRYFCTERGPQFHYIALELCRASLQEYVENPDLDRGGLEPEVVLQQLMSGLAHLHSLHIVHRDLKPGNILITGPDSQGLGRVVLSDFGLCKKLPAGRCSFSLHSGIPGTEGWMAPELLQLLPPDSPTSAVDIFSAGCVFYYVLSGGSHPFGDSLYRQANILTGAPCLAHLEEEVHDKVVARDLVGAMLSPLPQPRPSAPQVLAHPFFWSRAKQLQFFQDVSDWLEKESEQEPLVRALEAGGCAVVRDNWHEHISMPLQTDLRKFRSYKGTSVRDLLRAVRNKKHHYRELPVEVRQALGQVPDGFVQYFTNRFPRLLLHTHRAMRSCASESLFLPYYPPDSEARRPCPGATGR

SEQ ID NO: 367 - protein, 384 aa, Homo sapiens
KLVRKNIEKDNAGQVTLVPEEPEDMWHTYNLVQVGDSLRASTIRKVQTESSTGSVGSNRVRTTLTLCVEAIDFDSQACQLRVKGTNIQENEYVKMGAYHTIELEPNRQFTLAKKQWDSVVLERIEQACDPAWSADVAAVVMQEGLAHICLVTPSMTLTRAKVEVNIPRKRKGNCSQHDRALERFYEQVVQAIQRHIHFDVVKCILVASPGFVREQFCDYLFQQAVKTDNKLLLENRSKFLQVHASSGHKYSLKEALCDPTVASRLSDTKAAGEVKALDDFYKMLQHEPDRAFYGLKQVEKANEAMAIDTLLISDELFRHQDVATRSRYVRLVDSVKENAGTVRIFSSLHVSGEQLSQLTGVAAILRFPVPELSDQEGDSSSEED

SEQ ID NO: 368 - protein, 166 aa, Homo sapiens
SLVIRNLQRVIPIRRAPLRSKIEIVRRILGVQKFDLGIICVDNKNIQHINRIYRDRNVPTDVLSFPFHEHLKAGEFPQPDFPDDYNLGDIFLGVEYIFHQCKENEDYNDVLTVTATHGLCHLLGFTHGTEAEWQQMFQKEKAVLDELGRRTGTRLQPLTRGLFGGS

SEQ ID NO: 369 - protein, 178 aa, Homo sapiens
QEVIAGLERFTFAFEKDVEMQKGTGLLPFQGMDKSASAVCNFFTKGLCEKGKLCPFRHDRGEKMVVCKHWLRGLCKKGDHCKFLHQYDLTRMPECYFYSKFGDCSNKECSFLHVKPAFKSQDCPWYDQGFCKDGPLCKYRHVPRIMCLNYLVGFCPEGPKCQFAQKIREFKLLPGSKI

SEQ ID NO: 370 - protein, 384 aa, Homo sapiens
KLVRKNIEKDNAGQVTLVPEEPEDMWHTYNLVQVGDSLRASTIRKVQTESSTGSVGSNRVRTTLTLCVEAIDFDSQACQLRVKGTNIQENEYVKMGAYHTIELEPNRQFTLAKKQWDSVVLERIEQACDPAWSADVAAVVMQEGLAHICLVTPSMTLTRAKVEVNIPRKRKGNCSQHDRALERFYEQVVQAIQRHIHFDVVKCILVASPGFVREQFCDYMFQQAVKTDNKLLLENRSKFLQVHASSGHKYSLKEALCDPTVASRLSDTKAAGEVKALDDFYKMLQHEPDRAFYGLKQVEKANEAMAIDTLLISDELFRHQDVATRSRYVRLVDSVKENAGTVRIFSSLHVSGEQLSQLTGVAAILRFPVPELSDQEGDSSSEED

SEQ ID NO: 371 - protein, 256 aa, Homo sapiens
DPAWSADVAAVVMQEGLAHICLVTPSMTLTRAKVEVNIPRKRKGNCSQHDRALERFYEQVVQAIQRHIHFDVVKCILVASPGFVREQFCDYMFQQAVKTDNKLLLENRSKFLQVHASSGHKYSLKEALCDPTVASRLSDTKAAGEVKALDDFYKMLQHEPDRAFYGLKQVEKANEAMAIDTLLISDELFRHQDVATRSRYVRLVDSVKENAGTVRIFSSLHVSGEQLSQLTGVAAILRFPVPELSDQEGDSSSEED

SEQ ID NO: 372 - protein, 209 aa, Homo sapiens
MDPGKDKEGVPQPSGPPARKKFVIPLDEDEVPPGVRGNPVLKFVRNVPWEFGDVIPDYVLGQSTCALFLSLRYHNLHPDYIHGRLQSLGKNFALRVLLVQVDVKDPQQALKELAKMCILADCTLILAWSPEEAGRYLETYKAYEQKPADLLMEKLEQDFVSRVTECLTTVKSVNKTDSQTLLTTFGSLEQLIAASREDLALCPGLGPQK

SEQ ID NO: 373 - protein, 128 aa, Homo sapiens
KESRAKKFQRQHMDSDSSPSSSSTYCNQMMRRRNMTQGRCKPVNTFVHEPLVDVQNVCFQEKVTCKNGQGNCYKSNSSMHITDCRLTNGSRYPNCAYRTSPKERHIIVACEGSPYVPVHFDASVEDST

SEQ ID NO: 374 - protein, 123 aa, Homo sapiens [sequence omitted]

SEQ ID NO: 375 - protein, 129 aa, Homo sapiens
GLGLVQPSYGQDGMYQRFLRQHVHPEETGGSDRYCNLMMQRRKMTLYHCKRFNTFIHEDIWNIRSICSTTNIQCKNGKMNCHEGVVKVTDCRDTGSSRAPNCRYRAIASTRRVVIACEGNPQVPVHFDG

SEQ ID NO: 376 - protein, 375 aa, Homo sapiens
  SITE (1)..(1): Xaa can be any naturally occurring amino acid
XSAVDNILLKLAKFKIGFLRLGQIQKVHPAIQQFTEQEICRSKSIKSLALLEELYNSQLIVATTCMGINHPIFSRKIFDFCIVDEASQISQPICLGPLFFSRRFVLVGDHQQLPPLVLNREARALGMSESLFKRLEQNKSAVVQLTVQYRMNSKIMSLSNKLTYEGKLECGSDKVANAVINLRHFKDVKLELEFYADYSDNPWLMGVFEPNNPVCFLNTDKVPAPEQVEKGGVSNVTEAKLIVFLTSIFVKAGCSPSDIGIIAPYRQQLKIINDLLARSIGMVEVNTVDKYQGRDKSIVLVSFVRSNKDGTVGELLKDWRRLNVAITRAKHKLILLGCVPSLNCYPPLEKLLNHLNSEKLISFFFCIWSHLIALL

SEQ ID NO: 377 - protein, 88 aa, Homo sapiens
MALRSHDRSTRPLYISVGHRMSLEAAVRLTCCCCRFRIPEPVRQADICSREHIRKSLGLPGPPTPRSPKAQRPVACPKGDSGESSALC

SEQ ID NO: 378 - protein, 212 aa, Homo sapiens
CYTNHALSYDQAKRVPRWVLEHISKSKIMGDADRKHCKFKPDPNIPPTFSAFNEDYVGSGWSRGHMAPAGNNKFSSKAMAETFYLSNIVPQDFDNNSGYWNRIEMYCRELTERFEDVWVVSGPLTLPQTRGDGKKIVSYQVIGEDNVAVPSHLYKVILARRSSVSTEPLALGAFVVPNEAIGFQPQLTEFQVSLQDLEKLSGLVFFPHLDRT

SEQ ID NO: 379 - protein, 123 aa, Homo sapiens
VTVSQMTSVLNGKTRRFADIQLQHGALCFNIRYGTTVEEEKNHVLEIARQRAVAQAWTKEQRRLQEGEEGIRAWTEGEKQQLLSTGRVQGYDGYFVLSVEQYLELSDSANNIHFMRQSEIGRR

SEQ ID NO: 380 - protein, 125 aa, Homo sapiens
TVSQPTLLVNGKTRRFTNIEFQYSTLLLSIRYGLTPDTLDEEKARVLDQARQRALGTAWAKEQQKARDGREGSRLWTEGEKQQLLSTGRVQGYEGYYVLPVEQYPELADSSSNIQFLRQNEMGKR

SEQ ID NO: 381 - protein, 137 aa, Artificial Sequence
  RNAseK
MGWLRPGPRPLCPPARASWAFSHRFPSPLAPRRSPTPFFMASLLCCGPKLAACGIVLSAWGVIMLIMLGIFFNVHSAVLIEDVPFTEKDFENGPQNIYNLYEQVSYNCFIAAGLYLLLGGFSFCQVRLNKRKEYMVR

SEQ ID NO: 382 - protein, 1245 aa, Artificial Sequence
  TALEN
MRIGKSSGWLNESVSLEYEHVSPPTRPRDTRRRPRAAGDGGLAHLHRRLAVGYAEDTPRTEARSPAPRRPLPVAPASAPPAPSLVPEPPMPVSLPAVSSPRFSAGSSAAITDPFPSLPPTPVLYAMARELEALSDATWQPAVPLPAEPPTDARRGNTVFDEASASSPVIASACPQAFASPPRAPRSARARRARTGGDAWPAPTFLSRPSSSRIGRDVFGKLVALGYSREQIRKLKQESLSEIAKYHTTLTGQGFTHADICRISRRRQSLRVVARNYPELAAALPELTRAHIVDIARQRSGDLALQALLPVATALTAAPLRLSASQIATVAQYGERPAIQALYRLRRKLTRAPLHLTPQQVVAIASNTGGKRALEAVCVQLPVLRAAPYRLSTEQVVAIASNKGGKQALEAVKAHLLDLLGAPYVLDTEQVVAIASHNGGKQALEAVKADLLDLRGAPYALSTEQVVAIASHNGGKQALEAVKADLLELRGAPYALSTEQVVAIASHNGGKQALEAVKAHLLDLRGVPYALSTEQVVAIASHNGGKQALEAVKAQLLDLRGAPYALSTAQVVAIASNGGGKQALEGIGEQLLKLRTAPYGLSTEQVVAIASHDGGKQALEAVGAQLVALRAAPYALSTEQVVAIASNKGGKQALEAVKAQLLELRGAPYALSTAQVVAIASHDGGNQALEAVGTQLVALRAAPYALSTEQVVAIASHDGGKQALEAVGAQLVALRAAPYALNTEQVVAIASSHGGKQALEAVRALFPDLRAAPYALSTAQLVAIASNPGGKQALEAVRALFRELRAAPYALSTEQVVAIASNHGGKQALEAVRALFRGLRAAPYGLSTAQVVAIASSNGGKQALEAVWALLPVLRATPYDLNTAQIVAIASHDGGKPALEAVWAKLPVLRGAPYALSTAQVVAIACISGQQALEAIEAHMPTLRQASHSLSPERVAAIACIGGRSAVEAVRQGLPVKAIRRIRREKAPVAGPPPASLGPTPQELVAVLHFFRAHQQPRQAFVDALAAFQATRPALLRLLSSVGVTEIEALGGTIPDATERWQRLLGRLGFRPATGAAAPSPDSLQGFAQSLERTLGSPGMAGQSACSPHRKRPAETAIAPRSIRRSPNNAGQPSEPWPDQLAWLQRRKRTARSHIRADSAASVPANLHLGTRAQFTPDRLRAEPGPIMQAHTSPASVSFGSHVAFEPGLPDPGTPTSADLASFEAEPFGVGPLDFHLDWLLQILET

SEQ ID NO: 383 - protein, 1373 aa, Artificial Sequence
  TALEN
MDPIRSRTPSPARELLPGPQPDRVQPTADRGGAPPAGGPLDGLPARRTMSRTRLPSPPAPSPAFSAGSFSDLLRQFDPSLLDTSLLDSMPAVGTPHTAAAPAECDEVQSGLRAADDPPPTVRVAVTAARPPRAKPAPRRRAAQPSDASPAAQVDLRTLGYSQQQQEKIKPKVGSTVAQHHEALVGHGFTHAHIVALSRHPAALGTVAVKYQDMIAALPEATHEDIVGVGKQWSGARALEALLTVAGELRGPPLQLDTGQLVKIAKRGGVTAVEAVHASRNALTGAPLNLTPAQVVAIASNNGGKQALETVQRLLPVLCQAHGLTPAQVVAIASHDGGKQALETMQRLLPVLCQAHGLPPDQVVAIASNIGGKQALETVQRLLPVLCQAHGLTPDQVVAIASHGGGKQALETVQRLLPVLCQAHGLTPDQVVAIASHDGGKQALETVQRLLPVLCQAHGLTPDQVVAIASNGGGKQALETVQRLLPVLCQAHGLTPDQVVAIASNGGKQALETVQRLLPVLCQAHGLTPDQVVAIASHDGGKQALETVQRLLPVLCQTHGLTPAQVVAIASHDGGKQALETVQQLLPVLCQAHGLTPDQVVAIASNIGGKQALATVQRLLPVLCQAHGLTPDQVVAIASNGGGKQALETVQRLLPVLCQAHGLTPDQVVAIASNGGGKQALETVQRLLPVLCQAHGLTQVQVVAIASNIGGKQALETVQRLLPVLCQAHGLTPAQVVAIASHDGGKQALETVQRLLPVLCQAHGLTPDQVVAIASNGGGKQALETVQRLLPVLCQAHGLTQEQVVAIASNNGGKQALETVQRLLPVLCQAHGLTPDQVVAIASNGGGKQALETVQRLLPVLCQAHGLTPAQVVAIASNIGGKQALETVQRLLPVLCQDHGLTLAQVVAIASNIGGKQALETVQRLLPVLCQAHGLTQDQVVAIASNIGGKQALETVQRLLPVLCQDHGLTPDQVVAIASNIGGKQALETVQRLLPVLCQDHGLTLDQVVAIASNGGKQALETVQRLLPVLCQDHGLTPDQVVAIASNSGGKQALETVQRLLPVLCQDHGLTPNQVVAIASNGGKQALESIVAQLSRPDPALAALTNDHLVALACLGGRPAMDAVKKGLPHAPELIRRVNRRIGERTSHRVADYAQVVRVLEFFQCHSHPAYAFDEAMTQFGMSRNGLVQLFRRVGVTELEARGGTLPPASQRWDRILQASGMKRAKPSPTSAQTPDQASLHAFADSLERDLDAPSPMHEGDQTGASSRKRSRSDRAVTGPSAQHSFEVRVPEQRDALHLPLSWRVKRPRTRIGGGLPDPGTPIAADLAASSTVMWEQDAAPFAGAADDFPAFNEEELAWLMELLPQSGSVGGTI

SEQ ID NO: 384 - protein, 1978 aa, Artificial Sequence
  ZNF638
MSRPRFNPRGDFPLQRPRAPNPSGMRPPGPFMRPGSMGLPRFYPAGRARGIPHRFAGHESYQNMGPQRMNVQVTQHRTDPRLTKEKLDFHEAQQKKGKPHGSRWDDEPHISASVAVKQSSVTQVTEQSPKVQSRYTKESASSILASFGLSNEDLEELSRYPDEQLTPENMPLILRDIRMRKMGRRLPNLPSQSRNKETLGSEAVSSNVIDYGHASKYGYTEDPLEVRIYDPEIPTDEVENEFQSQQNISASVPNPNVICNSMFPVEDVFRQMDFPGESSNNRSFFSVESGTKMSGLHISGGQSVLEPIKSVNQSINQTVSQTMSQSLIPPSMNQQPFSSELISSVSQQERIPHEPVINSSNVHVGSRGSKKNYQSQADIPIRSPFGIVKASWLPKFSHADAQKMKRLPTPSMMNDYYAASPRIFPHLCSLCNVECSHLKDWIQHQNTSTHIESCRQLRQQYPDWNPEILPSRRNEGNRKENETPRRRSHSPSPRRSRRSSSSHRFRRSRSPMHYMYRPRSRSPRICHRFISRYRSRSRSRSPYRIRNPFRGSPKCFRSVSPERMSRRSVRSSDRKKALEDVVQRSGHGTEFNKQKHLEAADKGHSPAQKPKTSSGTKPSVKPTSATKSDSNLGGHSIRCKSKNLEDDTLSECKQVSDKAVSLQRKLRKEQSLHYGSVLLITELPEDGCTEEDVRKLFQPFGKVNDVLIVPYRKEAYLEMEFKEAITAIMKYIETTPLTIKGKSVKICVPGKKKAQNKEVKKKTLESKKVSASTLKRDADASKAVEIVTSTSAAKTGQAKASVAKVNKSTGKSASSVKSVVTVAVKGNKASIKTAKSGGKKSLEAKKTGNVKNKDSNKPVTIPENSEIKTSIEVKATENCAKEAISDAALEATENEPLNKETEEMCVMLVSNLPNKGYSVEEVYDLAKPFGGLKDILILSSHKKAYIEINRKAAESMVKFYTCFPVLMDGNQLSISMAPENMNIKDEEAIFITLVKENDPEANIDTIYDRFVHLDNLPEDGLQCVLCVGLQFGKVDHHVFISNRNKAILQLDSPESAQSMYSFLKQNPQNIGDHMLTCSLSPKIDLPEVQIEHDPELEKESPGLKNSPIDESEVQTATDSPSVKPNELEEESTPSIQTETLVQQEEPCEEEAEKATCDSDFAVETLELETQGEEVKEEIPLVASASVSIEQFTENAEECALNQQMFNSDLEKKGAEIINPKTALLPSDSVFAEERNLKGILEESPSEAEDFISGITQTMVEAVAEVEKNETVSEILPSTCIVTLVPGIPTGDEKTVDKKNISEKKGNMDEKEEKEFNTKETRMDLQIGTEKAEKNEGRMDAEKVEKMAAMKEKPAENTLFKAYPNKGVGQANKPDETSKTSILAVSDVSSSKPSIKAVIVSSPKAKATVSKTENQKSFPKSVPRDQINAEKKLSAKEFGLLKPTSARSGLAESSSKFKPTQSSLTRGGSGRISALQGKLSKLDYRDITKQSQETEARPSIMKRDDSNNKTLAEQNTKNPKSTTGRSSKSKEEPLFPFNLDEFVTVDEVIEEVNPSQAKQNPLKGKRKETLKNVPFSELNLKKKKGKTSTPRGVEGELSFVTLDEIGEEEDAAAHLAQALVTVDEVIDEEELNMEEMVKNSNSLFTLDELIDQDDCISHSEPKDVTVLSVAEEQDLLKQERLVTVDEIGEVEELPLNESADITFATLNTKGNEGDTVRDSIGFISSQVPEDPSTLVTVDEIQDDSSDLHLVTLDEVTEEDEDSLADFNNLKEELNFVTVDEVGEEEDGDNDLKVELAQSKNDHPTDKKGNRKKRAVDTKKTKLESLSQVGPVNENVMEEDLKTMIERHLTAKTPTKRVRIGKTLPSEKAVVTEPAKGEEAFQMSEVDEESGLKDSEPERKRKKTEDSSSGKSVASDVPEELDFLVPKAGFFCPICSLFYSGEKAMTNHCKSTRHKQNTEKFMAKQRKEKEQNEAEERSSR

SEQ ID NO: 385 - DNA, 938 bp, Artificial Sequence
  tCAG promoter
ccattgacgtcaataatgacgtatgttcccatagtaacgccaatagggactttccattgacgtcaatgggtggagtatttacggtaaactgcccacttggcagtacatcaagtgtatcatatgccaagtacgccccctattgacgtcaatgacggtaaatggcccgcctggcattatgcccagtacatgaccttatgggactttcctacttggcagtacatctacgtattagtcatcgctattaccatggtcgaggtgagccccacgttctgcttcactctccccatctcccccccctccccacccccaattttgtatttatttattttttaattattttgtgcagcgatgggggcggggggggggggggggcgcgcgccaggcggggcggggcggggcgaggggcggggcggggcgaggcggagaggtgcggcggcagccaatcagagcggcgcgctccgaaagtttccttttatggcgaggcggcggcggcggcggccctataaaaagcgaagcgcgcggcgggcgggagtcgctgcgacgctgccttcgccccgtgccccgctccgccgccgcctcgcgccgcccgccccggctctgactgaccgcgttactcccacaggtgagcgggcgggacggcccttctcctccgggctgtaattagcgcttggtttaatgacggcttgtttcttttctgtggctgcgtgaaagccttgaggggctccgggagggccctttgtgcggggggagcggctcggggctgtccgcggggggacggctgccttcgggggggacggggcagggcggggttcggcttctggcgtgtgaccggcggctctagagcctctgctaaccatgttcatgccttcttctttttcctacagctcctgggcaacgtgctggttattgtgctgtctcatcattttggcaaagaattg

SEQ ID NO: 386-392 - skipped (7 entries)

SEQ ID NO: 393 - DNA, 28 bp, Leptotrichia shahii
ccaccccaatatcgaaggggactaaaac

SEQ ID NO: 394 - DNA, 36 bp, Leptotrichia wadei
gatttagactaccccaaaaacgaaggggactaaaac

SEQ ID NO: 395 - DNA, 36 bp, Listeria seeligeri
gtaagagactacctctatatgaaagaggactaaaac

SEQ ID NO: 396 - DNA, 35 bp, Lachnospiraceae bacterium MA2020
gtattgagaaaagccagatatagttggcaatagac

SEQ ID NO: 397 - DNA, 35 bp, Lachnospiraceae bacterium NK4A179
gttgatgagaagagcccaagatagagggcaataac

SEQ ID NO: 398 - DNA, 35 bp, Clostridium aminophilum DSM 10710
gtctattgccctctatatcgggctgttctccaaac

SEQ ID NO: 399 - DNA, 36 bp, Carnobacterium gallinarum DSM 4847
attaaagactacctctaaatgtaagaggactataac

SEQ ID NO: 400 - DNA, 36 bp, Carnobacterium gallinarum DSM 4847
aatataaactacctctaaatgtaagaggactataac

SEQ ID NO: 401 - DNA, 36 bp, Paludibacter propionicigenes WB4
cttgtggattatcccaaaattgaagggaactacaac

SEQ ID NO: 402 - DNA, 36 bp, Listeria weihenstephanensis FSL R9-0317
gatttagagtacctcaaaatagaagaggtctaaaac

SEQ ID NO: 403 - DNA, 36 bp, Listeriaceae bacterium FSL M6-0635
gatttagagtacctcaaaacaaaagaggactaaaac

SEQ ID NO: 404 - DNA, 36 bp, Leptotrichia wadei F0279
gatatagataaccccaaaaacgaagggatctaaaac

SEQ ID NO: 405 - DNA, 36 bp, Rhodobacter capsulatus SB 1003
gcctcacatcaccgccaagacgacggcggactgaac

SEQ ID NO: 406 - DNA, 36 bp, Rhodobacter capsulatus R121; identical to SEQ ID NO: 405

SEQ ID NO: 407 - DNA, 36 bp, Rhodobacter capsulatus DE442; identical to SEQ ID NO: 405

SEQ ID NO: 408 - protein, 1389 aa, Artificial Sequence
  Cas13a
MGNLFGHKRWYEVRDKKDFKIKRKVKVKRNYDGNKYILNINENNNKEKIDNNKFIRKYINYKKNDNILKEFTRKFHAGNILFKLKGKEGIIRIENNDDFLETEEVVLYIEAYGKSEKLKALGITKKKIIDEAIRQGITKDDKKIEIKRQENEEEIEIDIRDEYTNKTLNDCSIILRIIENDELETKKSIYEIFKNINMSLYKIIEKIIENETEKVFENRYYEEHLREKLLKDDKIDVILTNFMEIREKIKSNLEILGFVKFYLNVGGDKKKSKNKKMLVEKILNINVDLTVEDIADFVIKELEFWNITKRIEKVKKVNNEFLEKRRNRTYIKSYVLLDKHEKFKIERENKKDKIVKFFVENIKNNSIKEKIEKILAEFKIDELIKKLEKELKKGNCDTEIFGIFKKHYKVNFDSKKFSKKSDEEKELYKIIYRYLKGRIEKILVNEQKVRLKKMEKIEIEKILNESILSEKILKRVKQYTLEHIMYLGKLRHNDIDMTTVNTDDFSRLHAKEELDLELITFFASTNMELNKIFSRENINNDENIDFFGGDREKNYVLDKKILNSKIKIIRDLDFIDNKNNITNNFIRKFTKIGTNERNRILHAISKERDLQGTQDDYNKVINIIQNLKISDEEVSKALNLDVVFKDKKNIITKINDIKISEENNNDIKYLPSFSKVLPEILNLYRNNPKNEPFDTIETEKIVLNALIYVNKELYKKLILEDDLEENESKNIFLQELKKTLGNIDEIDENIIENYYKNAQISASKGNNKAIKKYQKKVIECYIGYLRKNYEELFDFSDFKMNIQEIKKQIKDINDNKTYERITVKTSDKTIVINDDFEYIISIFALLNSNAVINKIRNRFFATSVWLNTSEYQNIIDILDEIMQLNTLRNECITENWNLNLEEFIQKMKEIEKDFDDFKIQTKKEIFNNYYEDIKNNILTEFKDDINGCDVLEKKLEKIVIFDDETKFEIDKKSNILQDEQRKLSNINKKDLKKKVDQYIKDKDQEIKSKILCRIIFNSDFLKKYKKEIDNLIEDMESENENKFQEIYYPKERKNELYIYKKNLFLNIGNPNFDKIYGLISNDIKMADAKFLFNIDGKNIRKNKISEIDAILKNLNDKLNGYSKEYKEKYIKKLKENDDFFAKNIQNKNYKSFEKDYNRVSEYKKIRDLVEFNYLNKIESYLIDINWKLAIQMARFERDMHYIVNGLRELGIIKLSGYNTGISRAYPKRNGSDGFYTTTAYYKFFDEESYKKFEKICYGFGIDLSENSEINKPENESIRNYISHFYIVRNPFADYSIAEQIDRVSNLLSYSTRYNNSTYASVFEVFKKDVNLDYDELKKKFKLIGNNDILERLMKPKKVSVLELESYNSDYIKNLIIELLTKIENTNDTL

SEQ ID NO: 409 - protein, 1221 aa, Bergeyella zoohelcum ATCC 43767
MENKTSLGNNIYYNPFKPQDKSYFAGYFNAAMENTDSVFRELGKRLKGKEYTSENFFDAIFKENISLVEYERYVKLLSDYFPMARLLDKKEVPIKERKENFKKNFKGIIKAVRDLRNFYTHKEHGEVEITDEIFGVLDEMLKSTVLTVKKKKVKTDKTKEILKKSIEKQLDILCQKKLEYLRDTARKIEEKRRNQRERGEKELVAPFKYSDKRDDLIAAIYNDAFDVYIDKKKDSLKESSKAKYNTKSDPQQEEGDLKIPISKNGVVFLLSLFLTKQEIHAFKSKIAGFKATVIDEATVSEATVSHGKNSICFMATHEIFSHLAYKKLKRKVRTAEINYGEAENAEQLSVYAKETLMMQMLDELSKVPDVVYQNLSEDVQKTFIEDWNEYLKENNGDVGTMEEEQVIHPVIRKRYEDKFNYFAIRFLDEFAQFPTLRFQVHLGNYLHDSRPKENLISDRRIKEKITVFGRLSELEHKKALFIKNTETNEDREHYWEIFPNPNYDFPKENISVNDKDFPIAGSILDREKQPVAGKIGIKVKLLNQQYVSEVDKAVKAHQLKQRKASKPSIQNIIEEIVPINESNPKEAIVFGGQPTAYLSMNDIHSILYEFFDKWEKKKEKLEKKGEKELRKEIGKELEKKIVGKIQAQIQQIIDKDTNAKILKPYQDGNSTAIDKEKLIKDLKQEQNILQKLKDEQTVREKEYNDFIAYQDKNREINKVRDRNHKQYLKDNLKRKYPEAPARKEVLYYREKGKVAVWLANDIKRFMPTDFKNEWKGEQHSLLQKSLAYYEQCKEELKNLLPEKVFQHLPFKLGGYFQQKYLYQFYTCYLDKRLEYISGLVQQAENFKSENKVFKKVENECFKFLKKQNYTHKELDARVQSILGYPIFLERGFMDEKPTIIKGKTFKGNEALFADWFRYYKEYQNFQTFYDTENYPLVELEKKQADRKRKTKIYQQKKNDVFTLLMAKHIFKSVFKQDSIDQFSLEDLYQSREERLGNQERARQTGERNTNYIWNKTVDLKLCDGKITVENVKLKNVGDFIKYEYDQRVQAFLKYEENIEWQAFLIKESKEEENYPYVVEREIEQYEKVRREELLKEVHLIEEYILEKVKDKEILKKGDNQNFKYYILNGLLKQLKNEDVESYKVFNLNTEPEDVNINQLKQEATDLEQKAFVLTYIRNKFAHNQLPKKEFWDYCQEKYGKEKTYAEYFAEVFKKEKEALIK

SEQ ID NO: 410 - protein, 3 aa, Homo sapiens
GGS

SEQ ID NO: 411 - protein, 7 aa, Artificial Sequence
  linker sequence
VDTANGS

SEQ ID NO: 412 - protein, 7 aa, Artificial Sequence
  linker sequence
VDTGNGS

SEQ ID NO: 413 - protein, 16 aa, Artificial Sequence
  linker sequence
SGSETPGTSESATPES

SEQ ID NO: 414 - protein, 10 aa, Homo sapiens
GGGGSGGGGS

SEQ ID NO: 415 - protein, 15 aa, Homo sapiens
GGGGSGGGGSGGGGS

SEQ ID NO: 416 - protein, 20 aa, Homo sapiens
GGGGSGGGGSGGGGSGGGGS

SEQ ID NO: 417 - protein, 10 aa, Artificial Sequence
  linker sequence
EAAAKEAAAK

SEQ ID NO: 418 - protein, 15 aa, Artificial Sequence
  linker sequence
EAAAKEAAAKEAAAK

SEQ ID NO: 419 - protein, 20 aa, Artificial Sequence
  linker sequence
EAAAKEAAAKEAAAKEAAAK

SEQ ID NO: 420 - protein, 8 aa, Homo sapiens
APAPAPAP

SEQ ID NO: 421 - protein, 12 aa, Artificial Sequence
  linker sequence
APAPAPAPAPAP

SEQ ID NO: 422 - protein, 18 aa, Artificial Sequence
  linker sequence
APAPAPAPAPAPAPAPAP

SEQ ID NO: 423 - protein, 10 aa, Artificial Sequence
  linker sequence
GGGGSEAAAK

SEQ ID NO: 424 - protein, 10 aa, Artificial Sequence
  linker sequence
EAAAKGGGGS

SEQ ID NO: 425 - protein, 20 aa, Artificial Sequence
  linker sequence
GGGGSGGGGSEAAAKEAAAK

SEQ ID NO: 426 - protein, 20 aa, Artificial Sequence
  linker sequence
EAAAKEAAAKGGGGSGGGGS

SEQ ID NO: 427 - protein, 16 aa, Artificial Sequence
  linker sequence
RQTSPDPCPQLPLVPR

SEQ ID NO: 428 - protein, 7 aa, Artificial Sequence
  linker sequence
VDTGNWF

SEQ ID NO: 429 - protein, 14 aa, Artificial Sequence
  linker sequence
VDTANGSVDTGNGS

SEQ ID NO: 430 - protein, 10 aa, Artificial Sequence
  linker sequence
ARNVEERLCL

SEQ ID NO: 431 - protein, 9 aa, Homo sapiens
AIELNPSNA

SEQ ID NO: 432 - protein, 7 aa, Homo sapiens
ICGSRNL

SEQ ID NO: 433 - protein, 9 aa, Homo sapiens
VLATDMSKH

SEQ ID NO: 434 - protein, 8 aa, Homo sapiens
FLRELPEP

SEQ ID NO: 435 - protein, 9 aa, Homo sapiens
LIPKDQYYC

SEQ ID NO: 436 - protein, 8 aa, Artificial Sequence
  FLAG Tag
DYKDDDDK

SEQ ID NO: 437 - protein, 7 aa, Artificial Sequence
  SV40 NLS Tag
PKKKRKV

SEQ ID NO: 438 - protein, 9 aa, Homo sapiens
GKKRKRSRK

SEQ ID NO: 439 - protein, 7 aa, Saccharomyces cerevisiae
GKKRSKV

SEQ ID NO: 440 - protein, 18 aa, Homo sapiens
KRALPNNTSSSPQPKKKP

SEQ ID NO: 441 - protein, 9 aa, Homo sapiens
PAAKRVKLD

SEQ ID NO: 442 - protein, 17 aa, Homo sapiens
KRSAEGSNPPKPLKKLR

SEQ ID NO: 443 - protein, 19 aa, Homo sapiens
KRPAATKKAGQAKKKKLDK

SEQ ID NO: 444 - protein, 349 aa, Artificial Sequence
  8PUF - frame 3
GRSRLLEDFRNNRYPNLQLREIAGHIMEFSQDQHGSRFIELKLERATPAERQLVFNEILQAAYQLMVDVFGNYVIQKFFEFGSLEQKLALAERIRGHVLSLALQMYGSYVIRKALEFIPSDQQNEMVRELDGHVLKCVKDQNGSYVVEKCIECVQPQSLQFIIDAFKGQVFALSTHPYGNRVIQRILEHCLPDQTLPILEELHQHTEQLVQDQYGSYVIRHVLEHGRPEDKSKIVAEIRGNVLVLSQHKFASNVVEKCVTHASRTERAVLIDEVCTMNDGPHSALYTMMKDQYANYVVQKMIDVAEPGQRKIVMHKIRPHIATLRKYTYGKHILAKLEKYYMKNGVDLG

SEQ ID NO: 445 - protein, 565 aa, Artificial Sequence
  14PUF - frame 3
GRSRLLEDFRNNRYPNLQLREIAGHIMEFSQDQHGSRFIELKLERATPAERQLVFNEILQAAYQLMVDVFGNYVIQKFFEFGSLEQKLALAERIRGHVLSLALQMYGSYVIRKALEFIPSDQQNEMVRELDGHVLKCVKDQNGSYVVEKCIECVQPQSLQFIIDAFKGQVFALSTHPYGNRVIQRILEHCLPDQTLPILEELHQHIMEFSQDQHGSRFIRLKLERATPAERQLVFNEILQAAYQLMVDVFGSYVIEKFFEFGSLEQKLALAERIRGHVLSLALQMYGNRVIQKALEFIPSDQQNEMVRELDGHVLKCVKDQNGSYVVRKCIECVQPQSLQFIIDAFKGQVFALSTHPYGSRVIERILEHCLPDQTLPILEELHQHTEQLVQDQYGNYVIQHVLEHGRPEDKSKIVAEIRGHTEQLVQDQYGSYVIRHVLEHGRPEDKSKIVAEIRGNVLVLSQHKFASNVVEKCVTHASRTERAVLIDEVCTMNDGPHSALYTMMKDQYANYVVQKMIDVAEPGQRKIVMHKIRPHIATLRKYTYGKHILAKLEKYYMKNGVDLG

SEQ ID NO: 446 - protein, 565 aa, Artificial Sequence
  14PUF - frame 3
GRSRLLEDFRNNRYPNLQLREIAGHIMEFSQDQHGSRFIELKLERATPAERQLVFNEILQAAYQLMVDVFGNYVIQKFFEFGSLEQKLALAERIRGHVLSLALQMYGSYVIRKALEFIPSDQQNEMVRELDGHVLKCVKDQNGSYVVEKCIECVQPQSLQFIIDAFKGQVFALSTHPYGNRVIQRILEHCLPDQTLPILEELHQHTEQLVQDQYGSYVIRHVLEHGRPEDKSKIVAEIRGHIMEFSQDQHGSRFIELKLERATPAERQLVFNEILQAAYQLMVDVFGNYVIQKFFEFGSLEQKLALAERIRGHVLSLALQMYGSYVIRKALEFIPSDQQNEMVRELDGHVLKCVKDQNGSYVVEKCIECVQPQSLQFIIDAFKGQVFALSTHPYGNRVIQRILEHCLPDQTLPILEELHQHTEQLVQDQYGSYVIRHVLEHGRPEDKSKIVAEIRGNVLVLSQHKFASNVVEKCVTHASRTERAVLIDEVCTMNDGPHSALYTMMKDQYANYVVQKMIDVAEPGQRKIVMHKIRPHIATLRKYTYGKHILAKLEKYYMKNGVDLG

SEQ ID NO: 447 - protein, 608 aa, Artificial Sequence
  15PUF - frame 3
GRSRLLEDFRNNRYPNLQLREIAGHIMEFSQDQHGSRFIRLKLERATPAERQLVFNEILQAAYQLMVDVFGSYVIEKFFEFGSLEQKLALAERIRGHVLSLALQMYGNRVIQKALEFIPSDQQNEMVRELDGHVLKCVKDQNGSYVVRKCIECVQPQSLQFIIDAFKGQVFALSTHPYGSRVIERILEHCLPDQTLPILEELHQHIMEFSQDQHGNRFIQLKLERATPAERQLVFNEILQAAYQLMVDVFGSYVIRKFFEFGSLEQKLALAERIRGHVLSLALQMYGSRVIEKALEFIPSDQQNEMVRELDGHVLKCVKDQNGNHVVQKCIECVQPQSLQFIIDAFKGQVFALSTHPYGSRVIRRILEHCLPDQTLPILEELHQHTEQLVQDQYGSYVIEHVLEHGRPEDKSKIVAEIRGNVLVLSQHKFANNVVQKCVTHASRTERAVLIDEVCTMNDGPHSHTEQLVQDQYGSYVIRHVLEHGRPEDKSKIVAEIRGNVLVLSQHKFASNVVEKCVTHASRTERAVLIDEVCTMNDGPHSALYTMMKDQYANYVVQKMIDVAEPGQRKIVMHKIRPHIATLRKYTYGKHILAKLEKYYMKNGVDLG

SEQ ID NO: 448 - protein, 608 aa, Artificial Sequence
  15PUF - frame 3
GRSRLLEDFRNNRYPNLQLREIAGHIMEFSQDQHGSRFIRLKLERATPAERQLVFNEILQAAYQLMVDVFGSYVIEKFFEFGSLEQKLALAERIRGHVLSLALQMYGNRVIQKALEFIPSDQQNEMVRELDGHVLKCVKDQNGSYVVRKCIECVQPQSLQFIIDAFKGQVFALSTHPYGSRVIERILEHCLPDQTLPILEELHQHTEQLVQDQYGNYVIQHVLEHGRPEDKSKIVAEIRGNVLVLSQHKFASYVVRKCVTHASRTERAVLIDEVCTMNDGPHSHIMEFSQDQHGSRFIELKLERATPAERQLVFNEILQAAYQLMVDVFGNYVIQKFFEFGSLEQKLALAERIRGHVLSLALQMYGSYVIRKALEFIPSDQQNEMVRELDGHVLKCVKDQNGSYVVEKCIECVQPQSLQFIIDAFKGQVFALSTHPYGNRVIQRILEHCLPDQTLPILEELHQHTEQLVQDQYGSYVIRHVLEHGRPEDKSKIVAEIRGNVLVLSQHKFASNVVEKCVTHASRTERAVLIDEVCTMNDGPHSALYTMMKDQYANYVVQKMIDVAEPGQRKIVMHKIRPHIATLRKYTYGKHILAKLEKYYMKNGVDLG

SEQ ID NO: 449 - protein, 644 aa, Artificial Sequence
  16PUF - frame 3
GRSRLLEDFRNNRYPNLQLREIAGHIMEFSQDQHGNRFIQLKLERATPAERQLVFNEILQAAYQLMVDVFGSYVIRKFFEFGSLEQKLALAERIRGHVLSLALQMYGSRVIEKALEFIPSDQQNEMVRELDGHVLKCVKDQNGNHVVQKCIECVQPQSLQFIIDAFKGQVFALSTHPYGSRVIRRILEHCLPDQTLPILEELHQHIMEFSQDQHGSRFIELKLERATPAERQLVFNEILQAAYQLMVDVFGNYVIQKFFEFGSLEQKLALAERIRGHVLSLALQMYGSYVIRKALEFIPSDQQNEMVRELDGHVLKCVKDQNGSYVVEKCIECVQPQSLQFIIDAFKGQVFALSTHPYGNRVIQRILEHCLPDQTLPILEELHQHTEQLVQDQYGSYVIRHVLEHGRPEDKSKIVAEIRGNVLVLSQHKFASNVVEKCVTHASRTERAVLIDEVCTMNDGPHSALYTMMKDQYANYVVQKMIDVAEPGQRKIVMHKIRPHTEQLVQDQYGSYVIRHVLEHGRPEDKSKIVAEIRGNVLVLSQHKFASNVVEKCVTHASRTERAVLIDEVCTMNDGPHSALYTMMKDQYANYVVQKMIDVAEPGQRKIVMHKIRPHIATLRKYTYGKHILAKLEKYYMKNGVDLG

SEQ ID NO: 450 - protein, 644 aa, Artificial Sequence
  16PUF - frame 3
GRSRLLEDFRNNRYPNLQLREIAGHIMEFSQDQHGNRFIQLKLERATPAERQLVFNEILQAAYQLMVDVFGSYVIRKFFEFGSLEQKLALAERIRGHVLSLALQMYGSRVIEKALEFIPSDQQNEMVRELDGHVLKCVKDQNGNHVVQKCIECVQPQSLQFIIDAFKGQVFALSTHPYGSRVIRRILEHCLPDQTLPILEELHQHTEQLVQDQYGSYVIEHVLEHGRPEDKSKIVAEIRGHIMEFSQDQHGNRFIQLKLERATPAERQLVFNEILQAAYQLMVDVFGSYVIRKFFEFGSLEQKLALAERIRGHVLSLALQMYGSRVIEKALEFIPSDQQNEMVRELDGHVLKCVKDQNGNHVVQKCIECVQPQSLQFIIDAFKGQVFALSTHPYGSRVIRRILEHCLPDQTLPILEELHQHTEQLVQDQYGSYVIEHVLEHGRPEDKSKIVAEIRGNVLVLSQHKFANNVVQKCVTHASRTERAVLIDEVCTMNDGPHSALYTMMKDQYASYVVRKMIDVAEPGQRKIVMHKIRPNVLVLSQHKFASNVVEKCVTHASRTERAVLIDEVCTMNDGPHSALYTMMKDQYANYVVQKMIDVAEPGQRKIVMHKIRPHIATLRKYTYGKHILAKLEKYYMKNGVDLG

SEQ ID NO: 451 - protein, 644 aa, Artificial Sequence
  16PUF - frame 3
GRSRLLEDFRNNRYPNLQLREIAGHIMEFSQDQHGNRFIQLKLERATPAERQLVFNEILQAAYQLMVDVFGSYVIRKFFEFGSLEQKLALAERIRGHVLSLALQMYGSRVIEKALEFIPSDQQNEMVRELDGHVLKCVKDQNGNHVVQKCIECVQPQSLQFIIDAFKGQVFALSTHPYGSRVIRRILEHCLPDQTLPILEELHQHTEQLVQDQYGSYVIEHVLEHGRPEDKSKIVAEIRGNVLVLSQHKFANNVVQKCVTHASRTERAVLIDEVCTMNDGPHSALYTMMKDQYASYVVRKMIDVAEPGQRKIVMHKIRPHIMEFSQDQHGSRFIELKLERATPAERQLVFNEILQAAYQLMVDVFGNYVIQKFFEFGSLEQKLALAERIRGHVLSLALQMYGSYVIRKALEFIPSDQQNEMVRELDGHVLKCVKDQNGSYVVEKCIECVQPQSLQFIIDAFKGQVFALSTHPYGNRVIQRILEHCLPDQTLPILEELHQHTEQLVQDQYGSYVIRHVLEHGRPEDKSKIVAEIRGNVLVLSQHKFASNVVEKCVTHASRTERAVLIDEVCTMNDGPHSALYTMMKDQYANYVVQKMIDVAEPGQRKIVMHKIRPHIATLRKYTYGKHILAKLEKYYMKNGVDLG

SEQ ID NO: 452 - DNA, 1047 bp, Artificial Sequence
  8PUF nucleic acid sequence
ggacgaagccgactcttggaagacttcagaaacaatcggtatccgaaccttcagctgagagaaattgctggtcacatcatggaattttctcaagatcaacatggaagccggtttattgaacttaaactcgaacgagccaccccggccgaaaggcaattggtgttcaatgaaattcttcaggccgcataccaactcatggttgatgtttttgggaactatgttattcaaaagttttttgagttcgggtcactggagcaaaagttggcattggcagagcgaatccggggccatgttctgagcctcgctctccaaatgtacggtagttatgtcattcgcaaagcactcgagttcataccatcagatcaacagaatgagatggtgcgggagctggatgggcatgttttgaaatgcgtgaaagaccaaaacggtagctacgtagttgagaaatgcatcgaatgcgtccaaccacagtctctccaatttattatagatgcatttaagggtcaggttttcgcgctttctacgcacccgtatgggaaccgagtgattcagagaatcttggagcactgcctgccggatcagacactccctatcttggaggaattgcaccagcataccgaacaattggtgcaagatcaatacggttcatatgttattcggcacgttcttgagcatggaaggccagaggacaagtcaaagatcgtcgctgagattagaggtaacgtattggtgctctcacaacacaaatttgcatctaatgtggtggagaaatgtgttactcatgcttctagaacggaaagggcagttctcatagacgaagtttgcacaatgaatgatggtcctcatagcgcactttataccatgatgaaggaccagtatgcaaactatgtcgtccagaaaatgatcgatgtggcggagcccggtcaacggaaaatcgtgatgcacaaaatccgacctcacattgctacactcagaaaatacacgtatggaaaacatattctggctaagctggagaaatattacatgaagaatggagtggatctgggg

SEQ ID NO: 453 - RNA, 8 nt, Homo sapiens
ugcugcug

SEQ ID NO: 454 - RNA, 14 nt, Homo sapiens
ugcugcugcugcug

SEQ ID NO: 455 - RNA, 15 nt, Homo sapiens
ugcugcugcugcugc

SEQ ID NO: 456 - RNA, 16 nt, Homo sapiens
ugcugcugcugcugcu

SEQ ID NO: 457 - RNA, 26 nt, Homo sapiens
agcagcagcagcagcagcagcagcag

SEQ ID NO: 458 - RNA, 26 nt, Homo sapiens
gcagcagcagcagcagcagcagcagc

SEQ ID NO: 459 - RNA, 26 nt, Homo sapiens
cagcagcagcagcagcagcagcagca

SEQ ID NO: 460 - DNA, 1686 bp, Artificial Sequence
  8PUF-E17 fusion protein insert
atggactataaagatgacgatgataaacccaaaaagaaacgcaaggtgggacgaagccgactcttggaagacttcagaaacaatcggtatccgaaccttcagctgagagaaattgctggtcacatcatggaattttctcaagatcaacatggaagccggtttattgaacttaaactcgaacgagccaccccggccgaaaggcaattggtgttcaatgaaattcttcaggccgcataccaactcatggttgatgtttttgggaactatgttattcaaaagttttttgagttcgggtcactggagcaaaagttggcattggcagagcgaatccggggccatgttctgagcctcgctctccaaatgtacggtagttatgtcattcgcaaagcactcgagttcataccatcagatcaacagaatgagatggtgcgggagctggatgggcatgttttgaaatgcgtgaaagaccaaaacggtagctacgtagttgagaaatgcatcgaatgcgtccaaccacagtctctccaatttattatagatgcatttaagggtcaggttttcgcgctttctacgcacccgtatgggaaccgagtgattcagagaatcttggagcactgcctgccggatcagacactccctatcttggaggaattgcaccagcataccgaacaattggtgcaagatcaatacggttcatatgttattcggcacgttcttgagcatggaaggccagaggacaagtcaaagatcgtcgctgagattagaggtaacgtattggtgctctcacaacacaaatttgcatctaatgtggtggagaaatgtgttactcatgcttctagaacggaaagggcagttctcatagacgaagtttgcacaatgaatgatggtcctcatagcgcactttataccatgatgaaggaccagtatgcaaactatgtcgtccagaaaatgatcgatgtggcggagcccggtcaacggaaaatcgtgatgcacaaaatccgacctcacattgctacactcagaaaatacacgtatggaaaacatattctggctaagctggagaaatattacatgaagaatggagtggatctgggggtggatactgccaatggcagcggtggtggcacccctaaggctcccaacctggagcctccactcccagaagaggaaaaggagggcagcgacctgagaccagtggtcatcgatgggagcaacgtggccatgagccatgggaacaaggaggtcttctcctgccggggcatcctgctggcagtgaactggtttctggagcggggccacacagacatcacagtgtttgtgccatcctggaggaaggagcagcctcggcccgacgtgcccatcacagaccagcacatcctgcgggaactggagaagaagaagatcctggtgttcacaccatcacgacgcgtgggtggcaagcgggtggtgtgctatgacgacagattcattgtgaagctggcctacgagtctgacgggatcgtggtttccaacgacacataccgtgacctccaaggcgagcggcaggagtggaagcgcttcatcgaggagcggctgctcatgtactccttcgtcaatgacaagtttatgccccctgatgacccactgggccggcacgggcccagcctggacaacttcctgcgtaagaagccactcactttggagtaa

SEQ ID NO: 461 - protein, 608 aa, Artificial Sequence; identical to SEQ ID NO: 448
  15PUF - frame 3

SEQ ID NO: 462 - protein, 11 aa, Homo sapiens
QHGSRFIQLKL

SEQ ID NO: 463 - protein, 11 aa, Homo sapiens
VFGNYVIQKFF

SEQ ID NO: 464 - protein, 11 aa, Homo sapiens
MYGCRVIQKAL

SEQ ID NO: 465 - protein, 11 aa, Homo sapiens
QNGNHVVQKCI

SEQ ID NO: 466 - protein, 11 aa, Homo sapiens
PYGCRVIQRIL

SEQ ID NO: 467 - protein, 11 aa, Homo sapiens
QYGNYVIQHVL

SEQ ID NO: 468 - protein, 11 aa, Homo sapiens
KFASNVVEKCV

SEQ ID NO: 469 - protein, 11 aa, Homo sapiens
QYANYVVQKMI

SEQ ID NO: 470 - DNA, 1047 bp, Homo sapiens
ggcaggagcaggcttttggaagattttcgaaacaaccggtaccccaatttacaactgcgggagattgctggacatataatggaattttcccaagaccagcatgggtccagattcattcagctgaaactggagcgtgccacaccagctgagcgccagcttgtcttcaatgaaatcctccaggctgcctaccaactcatggtggatgtgtttggtaattacgtcattcagaagttctttgaatttggcagtcttgaacagaagctggctttggcagaacggattcgaggccacgtcctgtcattggcactacagatgtatggctgccgtgttatccagaaagctcttgagtttattccttcagaccagcagaatgagatggttcgggaactagatggccatgtcttgaagtgtgtgaaagatcagaatggcaatcacgtggttcagaaatgcattgaatgtgtacagccccagtctttgcaatttatcatcgatgcgtttaagggacaggtatttgccttatccacacatccttatggctgccgagtgattcagagaatcctggagcactgtctccctgaccagacactccctattttagaggagcttcaccagcacacagagcagcttgtacaggatcaatatggaaattatgtaatccaacatgtactggagcacggtcgtcctgaggataaaagcaaaattgtagcagaaatccgaggcaatgtacttgtattgagtcagcacaaatttgcaagcaatgttgtggagaagtgtgttactcacgcctcacgtacggagcgcgctgtgctcatcgatgaggtgtgcaccatgaacgacggtccccacagtgccttatacaccatgatgaaggaccagtatgccaactacgtggtccagaagatgattgacgtggcggagccaggccagcggaagatcgtcatgcataagatccggccccacatcgcaactcttcgtaagtacacctatggcaagcacattctggccaagctggagaagtactacatgaagaacggtgttgacttaggg

SEQ ID NO: 471 - protein, 351 aa, Homo sapiens
GRSRLLEDFRNNRYPNLQLREIAGHIMEFSQDQHGSRFIQLKLERATPAERQLVFNEILQAAYQLMVDVFGNYVIQKFFEFGSLEQKLALAERIRGHVLSLALQMYGCRVIQKALEFIPSDQQVINEMVRELDGHVLKCVKDQNGNHVVQKCIECVQPQSLQFIIDAFKGQVFALSTHPYGCRVIQRILEHCLPDQTLPILEELHQHTEQLVQDQYGNYVIQHVLEHGRPEDKSKIVAEIRGNVLVLSQHKFASNVVEKCVTHASRTERAVLIDEVCTMNDGPHSALYTMMKDQYANYVVQKMIDVAEPGQRKIVMHKIRPHIATLRKYTYGKHILAKLEKYYMKNGVDLG

SEQ ID NO: 472 - RNA, 8 nt, Homo sapiens
cugcugcu

SEQ ID NO: 473 - RNA, 14 nt, Homo sapiens
cugcugcugcugcu

SEQ ID NO: 474 - RNA, 15 nt, Homo sapiens
cugcugcugcugcug

SEQ ID NO: 475 - RNA, 16 nt, Homo sapiens
cugcugcugcugcugc

SEQ ID NO: 476 - RNA, 8 nt, Homo sapiens
gcugcugc

SEQ ID NO: 477 - RNA, 14 nt, Homo sapiens
gcugcugcugcugc

SEQ ID NO: 478 - RNA, 15 nt, Homo sapiens
gcugcugcugcugcu

SEQ ID NO: 479 - RNA, 16 nt, Homo sapiens
gcugcugcugcugcug

SEQ ID NO: 480 - protein, 349 aa, Artificial Sequence
  8PUF - frame 1
GRSRLLEDFRNNRYPNLQLREIAGHIMEFSQDQHGNRFIQLKLERATPAERQLVFNEILQAAYQLMVDVFGSYVIRKFFEFGSLEQKLALAERIRGHVLSLALQMYGSRVIEKALEFIPSDQQNEMVRELDGHVLKCVKDQNGNHVVQKCIECVQPQSLQFIIDAFKGQVFALSTHPYGSRVIRRILEHCLPDQTLPILEELHQHTEQLVQDQYGSYVIEHVLEHGRPEDKSKIVAEIRGNVLVLSQHKFANNVVQKCVTHASRTERAVLIDEVCTMNDGPHSALYTMMKDQYASYVVRKMIDVAEPGQRKIVMHKIRPHIATLRKYTYGKHILAKLEKYYMKNGVDLG

SEQ ID NO: 481 - protein, 565 aa, Artificial Sequence
  14PUF - frame 1
GRSRLLEDFRNNRYPNLQLREIAGHIMEFSQDQHGNRFIQLKLERATPAERQLVFNEILQAAYQLMVDVFGSYVIRKFFEFGSLEQKLALAERIRGHVLSLALQMYGSRVIEKALEFIPSDQQNEMVRELDGHVLKCVKDQNGNHVVQKCIECVQPQSLQFIIDAFKGQVFALSTHPYGSRVIRRILEHCLPDQTLPILEELHQHIMEFSQDQHGSRFIELKLERATPAERQLVFNEILQAAYQLMVDVFGNYVIQKFFEFGSLEQKLALAERIRGHVLSLALQMYGSYVIRKALEFIPSDQQNEMVRELDGHVLKCVKDQNGSYVVEKCIECVQPQSLQFIIDAFKGQVFALSTHPYGNRVIQRILEHCLPDQTLPILEELHQHTEQLVQDQYGSYVIRHVLEHGRPEDKSKIVAEIRGHTEQLVQDQYGSYVIEHVLEHGRPEDKSKIVAEIRGNVLVLSQHKFANNVVQKCVTHASRTERAVLIDEVCTMNDGPHSALYTMMKDQYASYVVRKMIDVAEPGQRKIVMHKIRPHIATLRKYTYGKHILAKLEKYYMKNGVDLG

SEQ ID NO: 482 - protein, 565 aa, Artificial Sequence
  14PUF - frame 1
GRSRLLEDFRNNRYPNLQLREIAGHIMEFSQDQHGNRFIQLKLERATPAERQLVFNEILQAAYQLMVDVFGSYVIRKFFEFGSLEQKLALAERIRGHVLSLALQMYGSRVIEKALEFIPSDQQNEMVRELDGHVLKCVKDQNGNHVVQKCIECVQPQSLQFIIDAFKGQVFALSTHPYGSRVIRRILEHCLPDQTLPILEELHQHTEQLVQDQYGSYVIEHVLEHGRPEDKSKIVAEIRGHIMEFSQDQHGNRFIQLKLERATPAERQLVFNEILQAAYQLMVDVFGSYVIRKFFEFGSLEQKLALAERIRGHVLSLALQMYGSRVIEKALEFIPSDQQNEMVRELDGHVLKCVKDQNGNHVVQKCIECVQPQSLQFIIDAFKGQVFALSTHPYGSRVIRRILEHCLPDQTLPILEELHQHTEQLVQDQYGSYVIEHVLEHGRPEDKSKIVAEIRGNVLVLSQHKFANNVVQKCVTHASRTERAVLIDEVCTMNDGPHSALYTMMKDQYASYVVRKMIDVAEPGQRKIVMHKIRPHIATLRKYTYGKHILAKLEKYYMKNGVDLG

SEQ ID NO: 483 - protein, 608 aa, Artificial Sequence
  15PUF - frame 1
GRSRLLEDFRNNRYPNLQLREIAGHIMEFSQDQHGSRFIELKLERATPAERQLVFNEILQAAYQLMVDVFGNYVIQKFFEFGSLEQKLALAERIRGHVLSLALQMYGSYVIRKALEFIPSDQQNEMVRELDGHVLKCVKDQNGSYVVEKCIECVQPQSLQFIIDAFKGQVFALSTHPYGNRVIQRILEHCLPDQTLPILEELHQHIMEFSQDQHGSRFIRLKLERATPAERQLVFNEILQAAYQLMVDVFGSYVIEKFFEFGSLEQKLALAERIRGHVLSLALQMYGNRVIQKALEFIPSDQQNEMVRELDGHVLKCVKDQNGSYVVRKCIECVQPQSLQFIIDAFKGQVFALSTHPYGSRVIERILEHCLPDQTLPILEELHQHTEQLVQDQYGNYVIQHVLEHGRPEDKSKIVAEIRGNVLVLSQHKFASYVVRKCVTHASRTERAVLIDEVCTMNDGPHSHTEQLVQDQYGSYVIEHVLEHGRPEDKSKIVAEIRGNVLVLSQHKFANNVVQKCVTHASRTERAVLIDEVCTMNDGPHSALYTMMKDQYASYVVRKMIDVAEPGQRKIVMHKIRPHIATLRKYTYGKHILAKLEKYYMKNGVDLG

SEQ ID NO: 484 - protein, 608 aa, Artificial Sequence
  15PUF - frame 1
GRSRLLEDFRNNRYPNLQLREIAGHIMEFSQDQHGSRFIELKLERATPAERQLVFNEILQAAYQLMVDVFGNYVIQKFFEFGSLEQKLALAERIRGHVLSLALQMYGSYVIRKALEFIPSDQQNEMVRELDGHVLKCVKDQNGSYVVEKCIECVQPQSLQFIIDAFKGQVFALSTHPYGNRVIQRILEHCLPDQTLPILEELHQHTEQLVQDQYGSYVIRHVLEHGRPEDKSKIVAEIRGHIMEFSQDQHGSRFIELKLERATPAERQLVFNEILQAAYQLMVDVFGNYVIQKFFEFGSLEQKLALAERIRGHVLSLALQMYGSYVIRKALEFIPSDQQNEMVRELDGHVLKCVKDQNGSYVVEKCIECVQPQSLQFIIDAFKGQVFALSTHPYGNRVIQRILEHCLPDQTLPILEELHQHTEQLVQDQYGSYVIRHVLEHGRPEDKSKIVAEIRGNVLVLSQHKFASNVVEKCVTHASRTERAVLIDEVCTMNDGPHSNVLVLSQHKFANNVVQKCVTHASRTERAVLIDEVCTMNDGPHSALYTMMKDQYASYVVRKMIDVAEPGQRKIVMHKIRPHIATLRKYTYGKHILAKLEKYYMKNGVDLG

SEQ ID NO: 485 - protein, 608 aa, Artificial Sequence
  15PUF - frame 1
GRSRLLEDFRNNRYPNLQLREIAGHIMEFSQDQHGSRFIELKLERATPAERQLVFNEILQAAYQLMVDVFGNYVIQKFFEFGSLEQKLALAERIRGHVLSLALQMYGSYVIRKALEFIPSDQQNEMVRELDGHVLKCVKDQNGSYVVEKCIECVQPQSLQFIIDAFKGQVFALSTHPYGNRVIQRILEHCLPDQTLPILEELHQHTEQLVQDQYGSYVIRHVLEHGRPEDKSKIVAEIRGNVLVLSQHKFASNVVEKCVTHASRTERAVLIDEVCTMNDGPHSHIMEFSQDQHGNRFIQLKLERATPAERQLVFNEILQAAYQLMVDVFGSYVIRKFFEFGSLEQKLALAERIRGHVLSLALQMYGSRVIEKALEFIPSDQQNEMVRELDGHVLKCVKDQNGNHVVQKCIECVQPQSLQFIIDAFKGQVFALSTHPYGSRVIRRILEHCLPDQTLPILEELHQHTEQLVQDQYGSYVIEHVLEHGRPEDKSKIVAEIRGNVLVLSQHKFANNVVQKCVTHASRTERAVLIDEVCTMNDGPHSALYTMMKDQYASYVVRKMIDVAEPGQRKIVMHKIRPHIATLRKYTYGKHILAKLEKYYMKNGVDLG

SEQ ID NO: 486 - protein, 644 aa, Artificial Sequence
  16PUF - frame 1
GRSRLLEDFRNNRYPNLQLREIAGHIMEFSQDQHGSRFIRLKLERATPAERQLVFNEILQAAYQLMVDVFGSYVIEKFFEFGSLEQKLALAERIRGHVLSLALQMYGNRVIQKALEFIPSDQQNEMVRELDGHVLKCVKDQNGSYVVRKCIECVQPQSLQFIIDAFKGQVFALSTHPYGSRVIERILEHCLPDQTLPILEELHQHIMEFSQDQHGNRFIQLKLERATPAERQLVFNEILQAAYQLMVDVFGSYVIRKFFEFGSLEQKLALAERIRGHVLSLALQMYGSRVIEKALEFIPSDQQNEMVRELDGHVLKCVKDQNGNHVVQKCIECVQPQSLQFIIDAFKGQVFALSTHPYGSRVIRRILEHCLPDQTLPILEELHQHTEQLVQDQYGSYVIEHVLEHGRPEDKSKIVAEIRGNVLVLSQHKFANNVVQKCVTHASRTERAVLIDEVCTMNDGPHSALYTMMKDQYASYVVRKMIDVAEPGQRKIVMHKIRPHTEQLVQDQYGSYVIEHVLEHGRPEDKSKIVAEIRGNVLVLSQHKFANNVVQKCVTHASRTERAVLIDEVCTMNDGPHSALYTMMKDQYASYVVRKMIDVAEPGQRKIVMHKIRPHIATLRKYTYGKHILAKLEKYYMKNGVDLG

SEQ ID NO: 487 - protein, 644 aa, Artificial Sequence
  16PUF - frame 1
GRSRLLEDFRNNRYPNLQLREIAGHIMEFSQDQHGSRFIRLKLERATPAERQLVFNEILQAAYQLMVDVFGSYVIEKFFEFGSLEQKLALAERIRGHVLSLALQMYGNRVIQKALEFIPSDQQNEMVRELDGHVLKCVKDQNGSYVVRKCIECVQPQSLQFIIDAFKGQVFALSTHPYGSRVIERILEHCLPDQTLPILEELHQHTEQLVQDQYGNYVIQHVLEHGRPEDKSKIVAEIRGHIMEFSQDQHGSRFIRLKLERATPAERQLVFNEILQAAYQLMVDVFGSYVIEKFFEFGSLEQKLALAERIRGHVLSLALQMYGNRVIQKALEFIPSDQQNEMVRELDGHVLKCVKDQNGSYVVRKCIECVQPQSLQFIIDAFKGQVFALSTHPYGSRVIERILEHCLPDQTLPILEELHQHTEQLVQDQYGNYVIQHVLEHGRPEDKSKIVAEIRGNVLVLSQHKFASYVVRKCVTHASRTERAVLIDEVCTMNDGPHSALYTMMKDQYASYVVEKMIDVAEPGQRKIVMHKIRPNVLVLSQHKFANNVVQKCVTHASRTERAVLIDEVCTMNDGPHSALYTMMKDQYASYVVRKMIDVAEPGQRKIVMHKIRPHIATLRKYTYGKHILAKLEKYYMKNGVDLG

SEQ ID NO: 488 - protein, 644 aa, Artificial Sequence
  16PUF - frame 1
GRSRLLEDFRNNRYPNLQLREIAGHIMEFSQDQHGSRFIRLKLERATPAERQLVFNEILQAAYQLMVDVFGSYVIEKFFEFGSLEQKLALAERIRGHVLSLALQMYGNRVIQKALEFIPSDQQNEMVRELDGHVLKCVKDQNGSYVVRKCIECVQPQSLQFIIDAFKGQVFALSTHPYGSRVIERILEHCLPDQTLPILEELHQHTEQLVQDQYGNYVIQHVLEHGRPEDKSKIVAEIRGNVLVLSQHKFASYVVRKCVTHASRTERAVLIDEVCTMNDGPHSALYTMMKDQYASYVVEKMIDVAEPGQRKIVMHKIRPHIMEFSQDQHGNRFIQLKLERATPAERQLVFNEILQAAYQLMVDVFGSYVIRKFFEFGSLEQKLALAERIRGHVLSLALQMYGSRVIEKALEFIPSDQQNEMVRELDGHVLKCVKDQNGNHVVQKCIECVQPQSLQFIIDAFKGQVFALSTHPYGSRVIRRILEHCLPDQTLPILEELHQHTEQLVQDQYGSYVIEHVLEHGRPEDKSKIVAEIRGNVLVLSQHKFANNVVQKCVTHASRTERAVLIDEVCTMNDGPHSALYTMMKDQYASYVVRKMIDVAEPGQRKIVMHKIRPHIATLRKYTYGKHILAKLEKYYMKNGVDLG

SEQ ID NO: 489 - protein, 36 aa, Artificial Sequence
  PUF R8 G recognition sequence
ALYTMMKDQYASYVVRKMIDVAEPGQRKIVMHKIRP

SEQ ID NO: 490 - protein, 36 aa, Artificial Sequence
  PUF R2 U recognition sequence
AAYQLMVDVFGNYVIQKFFEFGSLEQKLALAERIRG

SEQ ID NO: 491 - protein, 36 aa, Artificial Sequence
  PUF R2 G recognition sequence
AAYQLMVDVFGSYVIEKFFEFGSLEQKLALAERIRG

SEQ ID NO: 492 - protein, 36 aa, Artificial Sequence
  PUF R2 C recognition sequence
AAYQLMVDVFGSYVIRKFFEFGSLEQKLALAERIRG

SEQ ID NO: 493 - protein, 36 aa, Artificial Sequence
  PUF R8 U recognition sequence
ALYTMMKDQYANYVVQKMIDVAEPGQRKIVMHKIRP

SEQ ID NO: 494 - protein, 36 aa, Artificial Sequence; identical to SEQ ID NO: 489
  PUF R8 C recognition sequence

SEQ ID NO: 495 - protein, 24 aa, Artificial Sequence
  PUF R1' sequence
GRSRLLEDFRNNRYPNLQLREIAG

SEQ ID NO: 496 - protein, 30 aa, Artificial Sequence
  PUF R8' sequence
HIATLRKYTYGKHILAKLEKYYMKNGVDLG

SEQ ID NO: 497 - protein, 36 aa, Artificial Sequence
  PUF R1 U recognition sequence
HIMEFSQDQHGNRFIQLKLERATPAERQLVFNEILQ

SEQ ID NO: 498 - protein, 36 aa, Artificial Sequence
  PUF R1 G recognition sequence
HIMEFSQDQHGSRFIELKLERATPAERQLVFNEILQ

SEQ ID NO: 499 - protein, 36 aa, Artificial Sequence
  PUF R1 C recognition sequence
HIMEFSQDQHGSRFIRLKLERATPAERQLVFNEILQ

SEQ ID NO: 500 - protein, 36 aa, Artificial Sequence
  PUF R6 U recognition sequence
HTEQLVQDQYGNYVIQHVLEHGRPEDKSKIVAEIRG

SEQ ID NO: 501 - protein, 36 aa, Artificial Sequence
  PUF R6 G recognition sequence
HTEQLVQDQYGSYVIEHVLEHGRPEDKSKIVAEIRG

SEQ ID NO: 502 - protein, 36 aa, Artificial Sequence
  PUF R6 C recognition sequence
HTEQLVQDQYGSYVIRHVLEHGRPEDKSKIVAEIRG

SEQ ID NO: 503 - protein, 36 aa, Artificial Sequence
  PUF R4 U recognition sequence
HVLKCVKDQNGNHVVQKCIECVQPQSLQFIIDAFKG

SEQ ID NO: 504 - protein, 36 aa, Artificial Sequence
  PUF R4 G recognition sequence
HVLKCVKDQNGSYVVEKCIECVQPQSLQFIIDAFKG

SEQ ID NO: 505 - protein, 36 aa, Artificial Sequence
  PUF R4 C recognition sequence
HVLKCVKDQNGSYVVRKCIECVQPQSLQFIIDAFKG

SEQ ID NO: 506 - protein, 36 aa, Artificial Sequence
  PUF R3 U recognition sequence
HVLSLALQMYGNRVIQKALEFIPSDQQNEMVRELDG

SEQ ID NO: 507 - protein, 36 aa, Artificial Sequence
  PUF R3 G recognition sequence
HVLSLALQMYGSRVIEKALEFIPSDQQNEMVRELDG

SEQ ID NO: 508 - protein, 36 aa, Artificial Sequence
  PUF R3 C recognition sequence
HVLSLALQMYGSYVIRKALEFIPSDQQNEMVRELDG

SEQ ID NO: 509 - protein, 43 aa, Artificial Sequence
  PUF R7 U recognition sequence
NVLVLSQHKFANNVVQKCVTHASRTERAVLIDEVCTMNDGPHS

SEQ ID NO: 510 - protein, 43 aa, Artificial Sequence
  PUF R7 G recognition sequence
NVLVLSQHKFASNVVEKCVTHASRTERAVLIDEVCTMNDGPHS

SEQ ID NO: 511 - protein, 43 aa, Artificial Sequence
  PUF R7 C recognition sequence
NVLVLSQHKFASYVVRKCVTHASRTERAVLIDEVCTMNDGPHS

SEQ ID NO: 512 - protein, 36 aa, Artificial Sequence
  PUF R5 U recognition sequence
QVFALSTHPYGNRVIQRILEHCLPDQTLPILEELHQ

SEQ ID NO: 513 - protein, 36 aa, Artificial Sequence
  PUF R5 G recognition sequence
QVFALSTHPYGSRVIERILEHCLPDQTLPILEELHQ

SEQ ID NO: 514 - protein, 36 aa, Artificial Sequence
  PUF R5 C recognition sequence
QVFALSTHPYGSRVIRRILEHCLPDQTLPILEELHQ

SEQ ID NO: 515 - DNA, 1680 bp, Artificial Sequence
  PUF8 CUG Nucleotide Sequence (whole insert including Flag tag, Sv-40 NLS, PUF and E17 fusion)
gactataaagatgacgatgataaacccaaaaagaaacgcaaggtgggacgaagccgactcttggaagacttcagaaacaatcggtatccgaaccttcagctgagagaaattgctggtcacatcatggaattttctcaagatcaacatggaagccggtttattgaacttaaactcgaacgagccaccccggccgaaaggcaattggtgttcaatgaaattcttcaggccgcataccaactcatggttgatgtttttgggaactatgttattcaaaagttttttgagttcgggtcactggagcaaaagttggcattggcagagcgaatccggggccatgttctgagcctcgctctccaaatgtacggtagttatgtcattcgcaaagcactcgagttcataccatcagatcaacagaatgagatggtgcgggagctggatgggcatgttttgaaatgcgtgaaagaccaaaacggtagctacgtagttgagaaatgcatcgaatgcgtccaaccacagtctctccaatttattatagatgcatttaagggtcaggttttcgcgctttctacgcacccgtatgggaaccgagtgattcagagaatcttggagcactgcctgccggatcagacactccctatcttggaggaattgcaccagcataccgaacaattggtgcaagatcaatacggttcatatgttattcggcacgttcttgagcatggaaggccagaggacaagtcaaagatcgtcgctgagattagaggtaacgtattggtgctctcacaacacaaatttgcatctaatgtggtggagaaatgtgttactcatgcttctagaacggaaagggcagttctcatagacgaagtttgcacaatgaatgatggtcctcatagcgcactttataccatgatgaaggaccagtatgcaaactatgtcgtccagaaaatgatcgatgtggcggagcccggtcaacggaaaatcgtgatgcacaaaatccgacctcacattgctacactcagaaaatacacgtatggaaaacatattctggctaagctggagaaatattacatgaagaatggagtggatctgggggtggatactgccaatggcagcggtggtggcacccctaaggctcccaacctggagcctccactcccagaagaggaaaaggagggcagcgacctgagaccagtggtcatcgatgggagcaacgtggccatgagccatgggaacaaggaggtcttctcctgccggggcatcctgctggcagtgaactggtttctggagcggggccacacagacatcacagtgtttgtgccatcctggaggaaggagcagcctcggcccgacgtgcccatcacagaccagcacatcctgcgggaactggagaagaagaagatcctggtgttcacaccatcacgacgcgtgggtggcaagcgggtggtgtgctatgacgacagattcattgtgaagctggcctacgagtctgacgggatcgtggtttccaacgacacataccgtgacctccaaggcgagcggcaggagtggaagcgcttcatcgaggagcggctgctcatgtactccttcgtcaatgacaagtttatgccccctgatgacccactgggccggcacgggcccagcctggacaacttcctgcgtaagaagccactcactttggag

SEQ ID NO: 516 - DNA, 1635 bp, Artificial Sequence
  PUF8 CUG Nucleotide Sequence (including PUF and E17 fusion no tags)
ggacgaagccgactcttggaagacttcagaaacaatcggtatccgaaccttcagctgagagaaattgctggtcacatcatggaattttctcaagatcaacatggaagccggtttattgaacttaaactcgaacgagccaccccggccgaaaggcaattggtgttcaatgaaattcttcaggccgcataccaactcatggttgatgtttttgggaactatgttattcaaaagttttttgagttcgggtcactggagcaaaagttggcattggcagagcgaatccggggccatgttctgagcctcgctctccaaatgtacggtagttatgtcattcgcaaagcactcgagttcataccatcagatcaacagaatgagatggtgcgggagctggatgggcatgttttgaaatgcgtgaaagaccaaaacggtagctacgtagttgagaaatgcatcgaatgcgtccaaccacagtctctccaatttattatagatgcatttaagggtcaggttttcgcgctttctacgcacccgtatgggaaccgagtgattcagagaatcttggagcactgcctgccggatcagacactccctatcttggaggaattgcaccagcataccgaacaattggtgcaagatcaatacggttcatatgttattcggcacgttcttgagcatggaaggccagaggacaagtcaaagatcgtcgctgagattagaggtaacgtattggtgctctcacaacacaaatttgcatctaatgtggtggagaaatgtgttactcatgcttctagaacggaaagggcagttctcatagacgaagtttgcacaatgaatgatggtcctcatagcgcactttataccatgatgaaggaccagtatgcaaactatgtcgtccagaaaatgatcgatgtggcggagcccggtcaacggaaaatcgtgatgcacaaaatccgacctcacattgctacactcagaaaatacacgtatggaaaacatattctggctaagctggagaaatattacatgaagaatggagtggatctgggggtggatactgccaatggcagcggtggtggcacccctaaggctcccaacctggagcctccactcccagaagaggaaaaggagggcagcgacctgagaccagtggtcatcgatgggagcaacgtggccatgagccatgggaacaaggaggtcttctcctgccggggcatcctgctggcagtgaactggtttctggagcggggccacacagacatcacagtgtttgtgccatcctggaggaaggagcagcctcggcccgacgtgcccatcacagaccagcacatcctgcgggaactggagaagaagaagatcctggtgttcacaccatcacgacgcgtgggtggcaagcgggtggtgtgctatgacgacagattcattgtgaagctggcctacgagtctgacgggatcgtggtttccaacgacacataccgtgacctccaaggcgagcggcaggagtggaagcgcttcatcgaggagcggctgctcatgtactccttcgtcaatgacaagtttatgccccctgatgacccactgggccggcacgggcccagcctggacaacttcctgcgtaagaagccactcactttggag

SEQ ID NO: 517 - DNA, 1656 bp, Artificial Sequence
  PUF8 CUG Nucleotide Sequence (including Sv-40 NLS PUF and E17 fusion)
cccaaaaagaaacgcaaggtgggacgaagccgactcttggaagacttcagaaacaatcggtatccgaaccttcagctgagagaaattgctggtcacatcatggaattttctcaagatcaacatggaagccggtttattgaacttaaactcgaacgagccaccccggccgaaaggcaattggtgttcaatgaaattcttcaggccgcataccaactcatggttgatgtttttgggaactatgttattcaaaagttttttgagttcgggtcactggagcaaaagttggcattggcagagcgaatccggggccatgttctgagcctcgctctccaaatgtacggtagttatgtcattcgcaaagcactcgagttcataccatcagatcaacagaatgagatggtgcgggagctggatgggcatgttttgaaatgcgtgaaagaccaaaacggtagctacgtagttgagaaatgcatcgaatgcgtccaaccacagtctctccaatttattatagatgcatttaagggtcaggttttcgcgctttctacgcacccgtatgggaaccgagtgattcagagaatcttggagcactgcctgccggatcagacactccctatcttggaggaattgcaccagcataccgaacaattggtgcaagatcaatacggttcatatgttattcggcacgttcttgagcatggaaggccagaggacaagtcaaagatcgtcgctgagattagaggtaacgtattggtgctctcacaacacaaatttgcatctaatgtggtggagaaatgtgttactcatgcttctagaacggaaagggcagttctcatagacgaagtttgcacaatgaatgatggtcctcatagcgcactttataccatgatgaaggaccagtatgcaaactatgtcgtccagaaaatgatcgatgtggcggagcccggtcaacggaaaatcgtgatgcacaaaatccgacctcacattgctacactcagaaaatacacgtatggaaaacatattctggctaagctggagaaatattacatgaagaatggagtggatctgggggtggatactgccaatggcagcggtggtggcacccctaaggctcccaacctggagcctccactcccagaagaggaaaaggagggcagcgacctgagaccagtggtcatcgatgggagcaacgtggccatgagccatgggaacaaggaggtcttctcctgccggggcatcctgctggcagtgaactggtttctggagcggggccacacagacatcacagtgtttgtgccatcctggaggaaggagcagcctcggcccgacgtgcccatcacagaccagcacatcctgcgggaactggagaagaagaagatcctggtgttcacaccatcacgacgcgtgggtggcaagcgggtggtgtgctatgacgacagattcattgtgaagctggcctacgagtctgacgggatcgtggtttccaacgacacataccgtgacctccaaggcgagcggcaggagtggaagcgcttcatcgaggagcggctgctcatgtactccttcgtcaatgacaagtttatgccccctgatgacccactgggccggcacgggcccagcctggacaacttcctgcgtaagaagccactcactttggag

SEQ ID NO: 518 - DNA, 3919 bp, Artificial Sequence
  CasRx-CTGguide3- whole nucleotide sequence from U6 promoter to BGH poly A
gagggcctatttcccatgattccttcatatttgcatatacgatacaaggctgttagagagataattggaattaatttgactgtaaacacaaagatattagtacaaaatacgtgacgtagaaagtaataatttcttgggtagtttgcagttttaaaattatgttttaaaatggactatcatatgcttaccgtaacttgaaagtatttcgatttcttggctttatatatcttgtggaaaggacgaaacaccgaacccctaccaactggtcggggtttgaaaccagcagcagcagcagcagcagcagcatttttttcctgcagcccggaccggtctaggtcttgaaaggagtgggaattggctccggtgcccgtcagtgggcagagcgcacatcgcccacagtccccgagaagttggggggaggggtcggcaattgatccggtgcctagagaaggtggcgcggggtaaactgggaaagtgatgtcgtgtactggctccgcctttttcccgagggtgggggagaaccgtatataagtgcagtagtcgccgtgaacgttctttttcgcaacgggtttgccgccagaacacaggacactgtgctggatatctgcagagaaccatgagccccaagaagaagagaaaggtggaggccagcatcgaaaaaaaaaagtccttcgccaagggcatgggcgtgaagtccacactcgtgtccggctccaaagtgtacatgacaaccttcgccgaaggcagcgacgccaggctggaaaagatcgtggagggcgacagcatcaggagcgtgaatgagggcgaggccttcagcgctgaaatggccgataaaaacgccggctataagatcggcaacgccaaattcagccatcctaagggctacgccgtggtggctaacaaccctctgtatacaggacccgtccagcaggatatgctcggcctgaaggaaactctggaaaagaggtacttcggcgagagcgctgatggcaatgacaatatttgtatccaggtgatccataacatcctggacattgaaaaaatcctcgccgaatacattaccaacgccgcctacgccgtcaacaatatctccggcctggataaggacattattggattcggcaagttctccacagtgtatacctacgacgaattcaaagaccccgagcaccatagggccgctttcaacaataacgataagctcatcaacgccatcaaggcccagtatgacgagttcgacaacttcctcgataaccccagactcggctatttcggccaggcctttttcagcaaggagggcagaaattacatcatcaattacggcaacgaatgctatgacattctggccctcctgagcggactgaggcactgggtggtccataacaacgaagaagagtccaggatctccaggacctggctctacaacctcgataagaacctcgacaacgaatacatctccaccctcaactacctctacgacaggatcaccaatgagctgaccaactccttctccaagaactccgccgccaacgtgaactatattgccgaaactctgggaatcaaccctgccgaattcgccgaacaatatttcagattcagcattatgaaagagcagaaaaacctcggattcaatatcaccaagctcagggaagtgatgctggacaggaaggatatgtccgagatcaggaaaaatcataaggtgttcgactccatcaggaccaaggtctacaccatgatggactttgtgatttataggtattacatcgaagaggatgccaaggtggctgccgccaataagtccctccccgataatgagaagtccctgagcgagaaggatatctttgtgattaacctgaggggctccttcaacgacgaccagaaggatgccctctactacgatgaagctaatagaatttggagaaagctcgaaaatatcatgcacaacatcaaggaatttaggggaaacaagacaagagagtataagaagaaggacgcccctagactgcccagaatcctgcccgctggccgtgatgtttccgccttcagcaaactcatgtatgccctgaccatgttcctggatggcaaggagatcaacgacctcctgaccaccctgattaataaattcgataacatccagagcttcctgaaggtgatgcctctcatcggagtcaacgctaagttcgtggaggaatacgcctttttcaaagactccgccaagatcgccgatgagctgaggctgatcaagtccttcgctagaatgggagaacctattgccgatgccaggagggccatgtatatcgacgccatccgtattttaggaaccaacctgtcctatgatgagctcaaggccctcgccgacaccttttccctggacgagaacggaaacaagctcaagaaaggcaagcacggcatgagaaatttcattattaataacgtgatcagcaataaaaggttccactacctgatcagatacggtgatcctgcccacctccatgagatcgccaaaaacgaggccgtggtgaagttcgtgctcggcaggatcgctgacatccagaaaaaacagggccagaacggcaagaaccagatcgacaggtactacgaaacttgtatcggaaaggataagggcaagagcgtgagcgaaaaggtggacgctctcacaaagatcatcaccggaatgaactacgaccaattcgacaagaaaaggagcgtcattgaggacaccggcagggaaaacgccgagagggagaagtttaaaaagatcatcagcctgtacctcaccgtgatctaccacatcctcaagaatattgtcaatatcaacgccaggtacgtcatcggattccattgcgtcgagcgtgatgctcaactgtacaaggagaaaggctacgacatcaatctcaagaaactggaagagaagggattcagctccgtcaccaagctctgcgctggcattgatgaaactgcccccgataagagaaaggacgtggaaaaggagatggctgaaagagccaaggagagcattgacagcctcgagagcgccaaccccaagctgtatgccaattacatcaaatacagcgacgagaagaaagccgaggagttcaccaggcagattaacagggagaaggccaaaaccgccctgaacgcctacctgaggaacaccaagtggaatgtgatcatcagggaggacctcctgagaattgacaacaagacatgtaccctgttcagaaacaaggccgtccacctggaagtggccaggtatgtccacgcctatatcaacgacattgccgaggtcaattcctacttccaactgtaccattacatcatgcagagaattatcatgaatgagaggtacgagaaaagcagcggaaaggtgtccgagtacttcgacgctgtgaatgacgagaagaagtacaacgataggctcctgaaactgctgtgtgtgcctttcggctactgtatccccaggtttaagaacctgagcatcgaggccctgttcgataggaacgaggccgccaagttcgacaaggagaaaaagaaggtgtccggcaattccggatccggacctaagaaaaagaggaaggtggcggccgcttacccatacgatgttccagattacgctgacgtgtaaccaccacactggactagtggatccgagctcggtaccaagcttaagtttaaaccgctgatcagcctcgactgtgccttctagttgccagccatctgttgtttgcccctcccccgtgccttccttgaccctggaaggtgccactcccactgtcctttcctaataaaatgaggaaattgcatcgcattgtctgagtaggtgtcattctattctggggggtggggtggggcaggacagcaagggggaggattgggaagacaatagcaggcatgctggggatgcggtgggctctatggc

SEQ ID NO: 519 - DNA, 249 bp, Artificial Sequence
  Human U6 promoter
gagggcctatttcccatgattccttcatatttgcatatacgatacaaggctgttagagagataattggaattaatttgactgtaaacacaaagatattagtacaaaatacgtgacgtagaaagtaataatttcttgggtagtttgcagttttaaaattatgttttaaaatggactatcatatgcttaccgtaacttgaaagtatttcgatttcttggctttatatatcttgtggaaaggacgaaacacc

SEQ ID NO: 520 - DNA, 256 bp, Artificial Sequence
  EFS promoter
taggtcttgaaaggagtgggaattggctccggtgcccgtcagtgggcagagcgcacatcgcccacagtccccgagaagttggggggaggggtcggcaattgatccggtgcctagagaaggtggcgcggggtaaactgggaaagtgatgtcgtgtactggctccgcctttttcccgagggtgggggagaaccgtatataagtgcagtagtcgccgtgaacgttctttttcgcaacgggtttgccgccagaacacagg

SEQ ID NO: 521 - DNA, 9 bp, Artificial Sequence
  linker sequence
gaggccagc

SEQ ID NO: 522 - DNA, 2898 bp, Artificial Sequence; identical to SEQ ID NO: 144
  casrx SEQ ID NO 144

SEQ ID NO: 523 - DNA, 9 bp, Artificial Sequence
  linker sequence
ggatccgga

SEQ ID NO: 524 - DNA, 21 bp, Artificial Sequence
  SV40 NLS Tag
cctaagaaaaagaggaaggtg

SEQ ID NO: 525 - DNA, 9 bp, Artificial Sequence
  linker sequence
gcggccgct

SEQ ID NO: 526 - DNA, 27 bp, Artificial Sequence
  HA tag
tacccatacgatgttccagattacgct

SEQ ID NO: 527 - DNA, 225 bp, Artificial Sequence
  BGH poly A
tgtgccttctagttgccagccatctgttgtttgcccctcccccgtgccttccttgaccctggaaggtgccactcccactgtcctttcctaataaaatgaggaaattgcatcgcattgtctgagtaggtgtcattctattctggggggtggggtggggcaggacagcaagggggaggattgggaagacaatagcaggcatgctggggatgcggtgggctctatggc

SEQ ID NO: 528 - DNA, 3740 bp, Artificial Sequence
  Seq198-CTGguide3- whole nucleotide sequence from U6 promoter to SV-40 poly A
gagggcctatttcccatgattccttcatatttgcatatacgatacaaggctgttagagagataattagaattaatttgactgtaaacacaaagatattagtacaaaatacgtgacgtagaaagtaataatttcttgggtagtttgcagttttaaaattatgttttaaaatggactatcatatgcttaccgtaacttgaaagtatttcgatttcttggctttatatatcttgtggaaaggacgaaacaccgcaagtaaacccctaccaagtggtcggggtttgaaaccagcagcagcagcagcagcagcagcattttttccaccacactggactagtggatctggatccctgcagccctccttaggtcttgaaaggagtgggaattggctccggtgcccgtcagtgggcagagcgcacatcgcccacagtccccgagaagttggggggaggggtcggcaattgatccggtgcctagagaaggtggcgcggggtaaactgggaaagtgatgtcgtgtactggctccgcctttttcccgagggtgggggagaaccgtatataagtgcagtagtcgccgtgaacgttctttttcgcaacgggtttgccgccagaacacaggtcacgcttaactaacgcgtgccgccaccatgatcgaaaagaagaagagctacgctaaaggaatgggcctgaaaagcaccatcgtgtccggctctaaagtgtacatgacaaccttcggcgatggcagcgaggccagactggagaaggtggttgagaacgatagcatcaagaccctgcacgagggcgaggccttcagcgctgagatgaccgacaacaacgccggctataagatcggaaacgtgaagttctcccaccctaacggctacgacgtggtcgccaacaaccctttctacaccggccctgtgcagcaggacatgctgggcctgaaagaaatcctggaaagacggtactttggatctagcacagacggtaacaataccatctgcatccaaatcatccacaatatcctggatatcgaaaaaattctggcagagtacatcacaaacgcagtgtacgccaccaacaacatcatcgatcctgataacgacgtgatcggcggcaagaagttcaccagcattaaaaccttcgcccagttctccgccagcgacagcagcaacgatttcgagcagttcctgaaaaatcccagactcggctacctgggcaaagcctttttctacaaggacggcaagcggaacaacagacagaaggatcctatcgagtgttaccacctgctggccctgctgtgcggcctgcgtaattgggttgtgcacaacaacgaggaaaaggacctgatcaagtacacctggttgtataacctggacaagtacctggatgccgagtacatcaccaccctgaactacatgtacaacgacatcggcgacgagttgacggactctttctccaagaacagcgccgccaatatcaactacatcgccgagaccctgggaatcgaccccaagaccttcgccgagcaatacttccggttctctatcatgaaggaacagaaaaacctgggattcaacctgaccaagctgagagaggtgatgctggaccggaaggacatgagcgagatcagagagaaccacaacgacttcgattctatcagagccaaggtgtacacaatgatggacttcgtgatctatcggtactacatcgaagaggccgctaaggtgaacgccgccaacaagagcctgcccgacaacgagaagagcctgagcgagaaagacatcttcgtgatttcactcagaggcagcttcaacgaagatcagaaggatcggctgtactacgacgaggcgcaaagactgtggtccaaggtgggcaaactgatgctgaaaatcaagaagttccggggcaaggacaccagaaagtacaagaatatgggcacacctagaatccggaggctgatccctgagggcagagatatcagcaccttctccaagctgatgtacgctctgactatgttcctggacggcaaggagatcaatgacctgctgaccacactgatcaacaaattcgacaacatccagagcttcttaaaggtgatgcctctgatcggcgtgaacgccaaatttgccgaagaatatagtttcttcaacaactctgaaaaaatcgccgacgaactgcggctgatcaagagctttgctagaatgggagaacccgtggctgacgccagaagagccatgtatatcgacgcaattcgcatcctgggcaccgatctctccgacgacgagctgaaggccctggctgattcttttagcctggacgagaacggcaataagctggggaagggcaagcacggcatgagaaacttcatcattaacaacgtgataacaaataagagattccactacctgatccggtacggcaacccagtccacctgcatgagatcgccaagaatgaagccgtggtcaagtttgtgctgggaagaatcgccgatatccagaagaaacagggccagaacggcaagaaccagatcgatagatactacgagacatgcatcggcaaggactcttctaaaagcgtggccgagaaggtgaacgccctgaccaagatcatcacaggcatgaactacgaccagttcgacagcagacggaacgtgatcgaaaacaccggcgccggcaacgccgagagagaaaagtacaagaagatcatcagcctgtacctgacagtgatctaccacatcctgaagaacattgttaatatcaactcaagatacgtgatcggatttcactgcgtggagagagatgcccagctgtataaggaaaagggctacgacattaatctgaaaaagctgaaagacaagggattcacaagcgtgaccaagctgtgcgccggaatcgacgaggaatgcaaggacgtcgaaaaggaaatgaccgagcgggccaaggcctctttcgctgccctggaaaccgccaaccccaagctgtacgccacatacatcaactactctgatgaagagaagaatgccgaactgagaaagcagatcaatagagagaaggccaaaaccgccctgaacgctcatctgcgcaacaccaagtggaacgtgatcatccgggaagatcttctgagaagagataacaaggcttgtaaaatcttcagaaataaggtcgcccacctggaggccatccgatacgctcacctgtacatcaacgacatcgctgaggtgaatagctattttcagttttaccactacatcatgcagcggaggatcatggccgaacggtacgacaagagcagcggcaaggttagagaatacttcgacgccgtgaacaatgagaaaaaatacaacgatagactgctgaagctcctctgtgtgccattcggctactgcatccctagattcaagaatctgagcatcgaggccctgttcgacatgaacgaggccgtgaagtttgataaggaaaagaagggatcccccaaaaaaaaaaggaaggtgtaaggatcctctagataactgatcataatcagccataccacatttgtagaggttttacttgctttaaaaaacctcccacacctccccctgaacctgaaacataaaatgaatgcaattgttgttgttaacttgtttattgcagcttataatggttacaaataaagcaatagcatcacaaatttcacaaataaagcatttttttcactgcattctagttgtggtttgtccaaactcatcaatgtatctta

SEQ ID NO: 529 - DNA, 12 bp, Artificial Sequence
  Kozak sequence
gccgccaccatg

SEQ ID NO: 530 - DNA, 2817 bp, Artificial Sequence
  Cas13d seq198
atcgaaaagaagaagagctacgctaaaggaatgggcctgaaaagcaccatcgtgtccggctctaaagtgtacatgacaaccttcggcgatggcagcgaggccagactggagaaggtggttgagaacgatagcatcaagaccctgcacgagggcgaggccttcagcgctgagatgaccgacaacaacgccggctataagatcggaaacgtgaagttctcccaccctaacggctacgacgtggtcgccaacaaccctttctacaccggccctgtgcagcaggacatgctgggcctgaaagaaatcctggaaagacggtactttggatctagcacagacggtaacaataccatctgcatccaaatcatccacaatatcctggatatcgaaaaaattctggcagagtacatcacaaacgcagtgtacgccaccaacaacatcatcgatcctgataacgacgtgatcggcggcaagaagttcaccagcattaaaaccttcgcccagttctccgccagcgacagcagcaacgatttcgagcagttcctgaaaaatcccagactcggctacctgggcaaagcctttttctacaaggacggcaagcggaacaacagacagaaggatcctatcgagtgttaccacctgctggccctgctgtgcggcctgcgtaattgggttgtgcacaacaacgaggaaaaggacctgatcaagtacacctggttgtataacctggacaagtacctggatgccgagtacatcaccaccctgaactacatgtacaacgacatcggcgacgagttgacggactctttctccaagaacagcgccgccaatatcaactacatcgccgagaccctgggaatcgaccccaagaccttcgccgagcaatacttccggttctctatcatgaaggaacagaaaaacctgggattcaacctgaccaagctgagagaggtgatgctggaccggaaggacatgagcgagatcagagagaaccacaacgacttcgattctatcagagccaaggtgtacacaatgatggacttcgtgatctatcggtactacatcgaagaggccgctaaggtgaacgccgccaacaagagcctgcccgacaacgagaagagcctgagcgagaaagacatcttcgtgatttcactcagaggcagcttcaacgaagatcagaaggatcggctgtactacgacgaggcgcaaagactgtggtccaaggtgggcaaactgatgctgaaaatcaagaagttccggggcaaggacaccagaaagtacaagaatatgggcacacctagaatccggaggctgatccctgagggcagagatatcagcaccttctccaagctgatgtacgctctgactatgttcctggacggcaaggagatcaatgacctgctgaccacactgatcaacaaattcgacaacatccagagcttcttaaaggtgatgcctctgatcggcgtgaacgccaaatttgccgaagaatatagtttcttcaacaactctgaaaaaatcgccgacgaactgcggctgatcaagagctttgctagaatgggagaacccgtggctgacgccagaagagccatgtatatcgacgcaattcgcatcctgggcaccgatctctccgacgacgagctgaaggccctggctgattcttttagcctggacgagaacggcaataagctggggaagggcaagcacggcatgagaaacttcatcattaacaacgtgataacaaataagagattccactacctgatccggtacggcaacccagtccacctgcatgagatcgccaagaatgaagccgtggtcaagtttgtgctgggaagaatcgccgatatccagaagaaacagggccagaacggcaagaaccagatcgatagatactacgagacatgcatcggcaaggactcttctaaaagcgtggccgagaaggtgaacgccctgaccaagatcatcacaggcatgaactacgaccagttcgacagcagacggaacgtgatcgaaaacaccggcgccggcaacgccgagagagaaaagtacaagaagatcatcagcctgtacctgacagtgatctaccacatcctgaagaacattgttaatatcaactcaagatacgtgatcggatttcactgcgtggagagagatgcccagctgtataaggaaaagggctacgacattaatctgaaaaagctgaaagacaagggattcacaagcgtgaccaagctgtgcgccggaatcgacgaggaatgcaaggacgtcgaaaaggaaatgaccgagcgggccaaggcctctttcgctgccctggaaaccgccaaccccaagctgtacgccacatacatcaactactctgatgaagagaagaatgccgaactgagaaagcagatcaatagagagaaggccaaaaccgccctgaacgctcatctgcgcaacaccaagtggaacgtgatcatccgggaagatcttctgagaagagataacaaggcttgtaaaatcttcagaaataaggtcgcccacctggaggccatccgatacgctcacctgtacatcaacgacatcgctgaggtgaatagctattttcagttttaccactacatcatgcagcggaggatcatggccgaacggtacgacaagagcagcggcaaggttagagaatacttcgacgccgtgaacaatgagaaaaaatacaacgatagactgctgaagctcctctgtgtgccattcggctactgcatccctagattcaagaatctgagcatcgaggccctgttcgacatgaacgaggccgtgaagtttgataaggaaaagaag

SEQ ID NO: 531 - DNA, 6 bp, Artificial Sequence
  linker sequence
ggatcc

SEQ ID NO: 532 - DNA, 21 bp, Artificial Sequence
  SV40 NLS
cccaaaaaaaaaaggaaggtg

SEQ ID NO: 533 - DNA, 122 bp, Artificial Sequence
  SV40 polyA
aacttgtttattgcagcttataatggttacaaataaagcaatagcatcacaaatttcacaaataaagcatttttttcactgcattctagttgtggtttgtccaaactcatcaatgtatctta

SEQ ID NO: 534 - DNA, 3803 bp, Artificial Sequence
  Seq179-CTGguide3- whole nucleotide sequence from U6 promoter to SV-40 poly A
gagggcctatttcccatgattccttcatatttgcatatacgatacaaggctgttagagagataattagaattaatttgactgtaaacacaaagatattagtacaaaatacgtgacgtagaaagtaataatttcttgggtagtttgcagttttaaaattatgttttaaaatggactatcatatgcttaccgtaacttgaaagtatttcgatttcttggctttatatatcttgtggaaaggacgaaacaccgactatagccctgccggaaatgacagggttctacaaccagcagcagcagcagcagcagcagcattttttccaccacactggactagtggatctggatccctgcagccctccttaggtcttgaaaggagtgggaattggctccggtgcccgtcagtgggcagagcgcacatcgcccacagtccccgagaagttggggggaggggtcggcaattgatccggtgcctagagaaggtggcgcggggtaaactgggaaagtgatgtcgtgtactggctccgcctttttcccgagggtgggggagaaccgtatataagtgcagtagtcgccgtgaacgttctttttcgcaacgggtttgccgccagaacacaggtcacgcttaactaacgcgtgccgccaccatggccaaaaagaagaaaaccgctcgccaactgagagaagaaatgcaacaacagcggaaacaggccattcagaagcaacaagaacagagacaagagaaagccgccgccgctcgcgagacagccgcccccgaacagcctgctgccgctcctgtgccaaagcggcaaagaaaatctctggccaaagccgccggactgaagtccaacttcatcttggacccacagagaagaacaacagtgatgacagcttttggccagggcagcaccgccatcctggagaagcagatcgtggacagagccatcagcgacctgcagccggttcagcagttccaagtggaacctgccagtgccgccaagtacaggctgaagaatagccgggtgagattccccaacgtgacagctgacgatcctctgtatagacggaaggatggcggcttcgtgcctggcatggacgccctcagaagaaagaacgtactggaacagagattcttcggcaagtctttcgccgataacatccacatccagatgatctacagcatcctggacatccacaagatcctcgctgccgcgagcggccacatcgtgcacctgctcaatatcgtgaatggctcaaaagatagagacttcatcggcatgctggccgcccacgtgctgtacaatgagctgaacgaggaggccaagcggagcatcgccgacttttgcaagagtcccagactgatctactactctgctgctttctacgagacattggacaacggcaagagcgagcgacggtctaacgaggacatcttcaacatcctggccctgatgacctgtctgagaaatttcagcagccaccacagcatcgccatcaaggtgaaggactacagcgccgctggcctgtacaacctgcggagactgggacctgacatgaagaaaatgctggacaccttctacaccgaggccttcatccagcttaaccagagcttccaggaccacaacaccacaaacctgacatgtctgttcgatatcctgaacatctctgatagcgccagacagaagcagctggctgaggaattttatagatacgtggtgttcaaggaacaaaagaacttgggattctccgtgcggaagctgagagaggaaatgctgctgctgccagacgctgccgtgatcgccgataagcggtacgacacctgcagatccaagctgtacaacctgatggacttcctgatcctgagagtgtacagaaccggcagagccgacagatgcgacaagctgcctgaggccctgcgggccgccctgaccgacgaggaaaaggccgtggtgtaccacaaagaagccctgagcctgtggaacgagatgagaaccctgatcctcgacggcctgctgcctcagatgacacctgagaacctgagcagactgtccggtcagaaaagaaagggcgaactgtctctggatgacgccatgctgaaagagtgcctgtacgagcccggacctgtgcccgaggatgctgcccctgaggaagccaacgccgagtacttctgccggatgatctacctggccaccctgtttatggatggcaaggagatcaacaccctgctgaccaccctgattagcaaattcgagaacatcgccgccttcctgcagaccatggaacagctgaacatcgaggccgagctgggccctgaatacgccatgtttaccagaagcagagccgtagccgagcagctgagagtgatcaacagcttcgccctgatgaagaagcctcaggtgaatgccaagcagcagctgtacagagccgctgtcaccctgctgggaacagaggaccctgacggcgtgaccgatgagatgctgtgcatcgaccccgtgaccggcaagatgctgcctcctaaccagaggcatcatggcgacaccggcttacggaacttcatcgcaaacaacgtggtggaaagccggagattccagtacttaatccggtacagcgatcctgctcagctgcaccagctcgccagcaacaagaagctggtcagattcgtgctgagcagcatccccgacacacagatcaacagatactatgaaacctgtggccagaccagactggccggcagagccgccaaggtggaattcctgacagacatgattgccgccatcagattcgaccagtttcgggatgtcaatcagaaagagcgcggcgccaatactcagaaagaaagatataaggccatgcttggcctgtaccagaccgtgctgtacctggctgttaaaaatctggtgaacattaacgccagatacgtgatggccttccactgcgtggagcgggatatgtttctgtatgacggcgagctgacagatcccaagggcgagagcgtgtctgctttcctggctgtgaatggaaagaagggcgtgcagcctcagtacctgctgctgacccagctgtttatccggcgggattaccttaagcggagtgcatgcgagcagatccagcacaacatggaaaacatctccgaccggctgctgcgggaataccggaacgccgtcgcccacctgaatgtgatagcccatctggctgactactctgccgacatgagagaaatcaccagctactacggcttgtatcactacctgatgcagagacacctcttcaaaagacacgcctggcagatcagacagcctgaaaggccaactgaggaggaacagaagctcatcgagcaggagcagaagcagctggcctgggagaaggccctgtttgacaagaccctgcagtaccacagctacaacaaggacctggtgaaggctcttaacgcccccttcggatacaacctggcaagatacaagaacctgtctatcgagcctctgttcagcaaagaagccgctcctgccgccgagatcaaggccacacacgccggatcccccaaaaaaaaaaggaaggtgtaaggatcctctagataactgatcataatcagccataccacatttgtagaggttttacttgctttaaaaaacctcccacacctccccctgaacctgaaacataaaatgaatgcaattgttgttgttaacttgtttattgcagcttataatggttacaaataaagcaatagcatcacaaatttcacaaataaagcatttttttcactgcattctagttgtggtttgtccaaactcatcaatgtatctta

SEQ ID NO: 535 - DNA, 2880 bp, Artificial Sequence
  Cas13 Seq179
gccaaaaagaagaaaaccgctcgccaactgagagaagaaatgcaacaacagcggaaacaggccattcagaagcaacaagaacagagacaagagaaagccgccgccgctcgcgagacagccgcccccgaacagcctgctgccgctcctgtgccaaagcggcaaagaaaatctctggccaaagccgccggactgaagtccaacttcatcttggacccacagagaagaacaacagtgatgacagcttttggccagggcagcaccgccatcctggagaagcagatcgtggacagagccatcagcgacctgcagccggttcagcagttccaagtggaacctgccagtgccgccaagtacaggctgaagaatagccgggtgagattccccaacgtgacagctgacgatcctctgtatagacggaaggatggcggcttcgtgcctggcatggacgccctcagaagaaagaacgtactggaacagagattcttcggcaagtctttcgccgataacatccacatccagatgatctacagcatcctggacatccacaagatcctcgctgccgcgagcggccacatcgtgcacctgctcaatatcgtgaatggctcaaaagatagagacttcatcggcatgctggccgcccacgtgctgtacaatgagctgaacgaggaggccaagcggagcatcgccgacttttgcaagagtcccagactgatctactactctgctgctttctacgagacattggacaacggcaagagcgagcgacggtctaacgaggacatcttcaacatcctggccctgatgacctgtctgagaaatttcagcagccaccacagcatcgccatcaaggtgaaggactacagcgccgctggcctgtacaacctgcggagactgggacctgacatgaagaaaatgctggacaccttctacaccgaggccttcatccagcttaaccagagcttccaggaccacaacaccacaaacctgacatgtctgttcgatatcctgaacatctctgatagcgccagacagaagcagctggctgaggaattttatagatacgtggtgttcaaggaacaaaagaacttgggattctccgtgcggaagctgagagaggaaatgctgctgctgccagacgctgccgtgatcgccgataagcggtacgacacctgcagatccaagctgtacaacctgatggacttcctgatcctgagagtgtacagaaccggcagagccgacagatgcgacaagctgcctgaggccctgcgggccgccctgaccgacgaggaaaaggccgtggtgtaccacaaagaagccctgagcctgtggaacgagatgagaaccctgatcctcgacggcctgctgcctcagatgacacctgagaacctgagcagactgtccggtcagaaaagaaagggcgaactgtctctggatgacgccatgctgaaagagtgcctgtacgagcccggacctgtgcccgaggatgctgcccctgaggaagccaacgccgagtacttctgccggatgatctacctggccaccctgtttatggatggcaaggagatcaacaccctgctgaccaccctgattagcaaattcgagaacatcgccgccttcctgcagaccatggaacagctgaacatcgaggccgagctgggccctgaatacgccatgtttaccagaagcagagccgtagccgagcagctgagagtgatcaacagcttcgccctgatgaagaagcctcaggtgaatgccaagcagcagctgtacagagccgctgtcaccctgctgggaacagaggaccctgacggcgtgaccgatgagatgctgtgcatcgaccccgtgaccggcaagatgctgcctcctaaccagaggcatcatggcgacaccggcttacggaacttcatcgcaaacaacgtggtggaaagccggagattccagtacttaatccggtacagcgatcctgctcagctgcaccagctcgccagcaacaagaagctggtcagattcgtgctgagcagcatccccgacacacagatcaacagatactatgaaacctgtggccagaccagactggccggcagagccgccaaggtggaattcctgacagacatgattgccgccatcagattcgaccagtttcgggatgtcaatcagaaagagcgcggcgccaatactcagaaagaaagatataaggccatgcttggcctgtaccagaccgtgctgtacctggctgttaaaaatctggtgaacattaacgccagatacgtgatggccttccactgcgtggagcgggatatgtttctgtatgacggcgagctgacagatcccaagggcgagagcgtgtctgctttcctggctgtgaatggaaagaagggcgtgcagcctcagtacctgctgctgacccagctgtttatccggcgggattaccttaagcggagtgcatgcgagcagatccagcacaacatggaaaacatctccgaccggctgctgcgggaataccggaacgccgtcgcccacctgaatgtgatagcccatctggctgactactctgccgacatgagagaaatcaccagctactacggcttgtatcactacctgatgcagagacacctcttcaaaagacacgcctggcagatcagacagcctgaaaggccaactgaggaggaacagaagctcatcgagcaggagcagaagcagctggcctgggagaaggccctgtttgacaagaccctgcagtaccacagctacaacaaggacctggtgaaggctcttaacgcccccttcggatacaacctggcaagatacaagaacctgtctatcgagcctctgttcagcaaagaagccgctcctgccgccgagatcaaggccacacacgcc

SEQ ID NO: 536 - DNA, 3760 bp, Artificial Sequence
  Seq42-CTGguide3- whole nucleotide sequence from U6 promoter to SV-40 poly A
gagggcctatttcccatgattccttcatatttgcatatacgatacaaggctgttagagagataattagaattaatttgactgtaaacacaaagatattagtacaaaatacgtgacgtagaaagtaataatttcttgggtagtttgcagttttaaaattatgttttaaaatggactatcatatgcttaccgtaacttgaaagtatttcgatttcttggctttatatatcttgtggaaaggacgaaacaccgaccaacacctctgcaaaactgcaggggtctaaaaccagcagcagcagcagcagcagcagcattttttccaccacactggactagtggatctctgcagccctccttaggtcttgaaaggagtgggaattggctccggtgcccgtcagtgggcagagcgcacatcgcccacagtccccgagaagttggggggaggggtcggcaattgatccggtgcctagagaaggtggcgcggggtaaactgggaaagtgatgtcgtgtactggctccgcctttttcccgagggtgggggagaaccgtatataagtgcagtagtcgccgtgaacgttctttttcgcaacgggtttgccgccagaacacaggtcacgcttaactaacgcgtgccgccaccatgaacaataagagaaagacaaaggccaaggccgctggactgaagagcgtcttttttgatcagaagcaagccgtgctgaccacattcgccaagggcaacaactcccagatcgagaagaaagtggtcaacagcgaggtcaaagatctgagacagcctcccgcctttgatctggaactgaaggagaagaccttctatatctccggcaagaacaacattaacacatctagggagaaccctctggctagcgcttctctgcctctctccaagaggcaaaggattagagccgagaggatcaagagagctagagaagaaaatagaccctaccataatgtcaagagggtgggagaggacgatctgagagccaaggctgacctcgagaaacactacttcggcaaggagtacagcgataatctgaaaattcagattatttataatatcctcgacatcaacaaaatcatcagcccctatatcaatgacatcgtctactccatgaacaatctggctagaaacgacgagtatatcgatggaaaaatcgacgtgatcggctccctctcctccaccacagactactcctccttcatgagccccaacaaggatctggaaaaggaaaaaaagttttccttccatagagaaaactacaaaaaattcgtcgaggccagcaagccctacatgaggtactatggaaaggtgtttattagagacgtgaagaaaagcaagctctccaccggaaagggcgagaagattgaggtgatgtatagatccgacgaggaaattttcaccatttttcaaattctgagctatgtgagacaatccatcatgcacaacgacatcggaaacaagagcagcattctggccatcgaaaagtaccccgccagattcgtcggctttctgagcgacctcctcaaaaccaagacaaacgatgtcaatagaatgttcattgacaataacagccaaacaaacttctgggtgctcttcagcatcttcggactgcaagatcacaccagcggagccgacaagatctgtagaaatttctacgacttcgtgatcaaggccgacagcaaaaacctcggattctccctcaagaagatcagagagctgatgctcgatctgcctaacgccaacatgctgagagatcaccaattcgataccgtgaggagcaagttttataccctcctcgacttcattatctatcaacactatctcgaggagaagtccagaatcgacaacatggtggagaagctgaggatgaccctcaaggaagaggaaaaggaagtgctctacgctgccgaggccaagattgtgtggaatgccatcggagccaaggtcatcaacaagctcgtgcccatgatgaatggcgatgctctgaaggagatcaagagaaaaaatagagatagaaagctccctcagagcgtgatcgccacagtgcaagtgaattccgacgccaatgtgttctccggactgatctactttctgacactgtttctcgacggcaaggagatcaacgagatggtgagcaacctcatcaccaagttcgagaacattgactctctgctgcatgtcgatagagaaatctacaagtccgacgagaaggatctggatctcgagatcgagaagctggccctctttttcaagggcgtggtgaggcctaatgccaagacagataccggcgccggagagatctccaagagcttctccatcttccagagcgccgaaaggattatcgaggaactgaagttcattaagaacgtcacaagaatggataacgagatcttccctagcgagggcgtgttcctcgatgccgctaacgtgctcggcgtcagaggcgatgactttgactttagcaatgagtttgtcggagacgatctgcacagcgacgctaataagaagattattaacaagatcaatggcaccaaggaggacagaaatctgaggaactttattattaataacgtcgtgaagagcagaaggtttcagtatatcgctagacacatgaatacacactacgtcaagcagctcgccaataacgagacactgaatagattcgtgctgaacaagatgggagacgccaagatcatcaataggtactacgagtccatctccggcaatacccccaatattgaggtcagaagccaaatcgactacctcgtcaagagactgaggagcttcagcttcgaagacctcaacgacgtcaagcaaaaggtgagacccggcaccaatgagagcatcgagaaggagaagaaaaaggccctcgtcggactgtgcctcacaattcagtacctcgtgtataaaaatctggtgaatatcaacgctaggtacaccaccgctttctactgtctggagagggactccaaactgaaaggctttggcgtggacgtgtggagagatttcgaatcctacaccgctctgaccaatcactttatcaaagaaggctatctgcccgtgagaaaggctgaaattctgagggccaatctgaagcatctggactgtgaagacggcttcaaatattacagaaaccaagtgacccacctcaacgccattagagtcgcctataaatatatcaacgagattaaatccgtgcacagctacttcgccctctaccactacatcatgcagagacatctgtacgacagcctccaagccaaagctaaggactcctccggcttcgtgatcgacgctctgaagaaatccttcgagcacaagatctacagcaaagatctgctccacgtgctgcactcccccttcggctataataccgctagatataaaaatctgagcatcgaggccctcttcgacaagaacgaatccagacccgaggtgaatcccctctccaccaatgatggatcccccaaaaaaaaaaggaaggtgtaaatccgatccaccggatctagataactgatcataatcagccataccacatttgtagaggttttacttgctttaaaaaacctcccacacctccccctgaacctgaaacataaaatgaatgcaattgttgttgttaacttgtttattgcagcttataatggttacaaataaagcaatagcatcacaaatttcacaaataaagcatttttttcactgcattctagttgtggtttgtccaaactcatcaatgtatctta

SEQ ID NO: 537 - DNA, 36 bp, Artificial Sequence
  Cas13d Seq42 direct repeat
gaccaacacctctgcaaaactgcaggggtctaaaac

SEQ ID NO: 538 - DNA, 2835 bp, Artificial Sequence
  Cas13d seq42
aacaataagagaaagacaaaggccaaggccgctggactgaagagcgtcttttttgatcagaagcaagccgtgctgaccacattcgccaagggcaacaactcccagatcgagaagaaagtggtcaacagcgaggtcaaagatctgagacagcctcccgcctttgatctggaactgaaggagaagaccttctatatctccggcaagaacaacattaacacatctagggagaaccctctggctagcgcttctctgcctctctccaagaggcaaaggattagagccgagaggatcaagagagctagagaagaaaatagaccctaccataatgtcaagagggtgggagaggacgatctgagagccaaggctgacctcgagaaacactacttcggcaaggagtacagcgataatctgaaaattcagattatttataatatcctcgacatcaacaaaatcatcagcccctatatcaatgacatcgtctactccatgaacaatctggctagaaacgacgagtatatcgatggaaaaatcgacgtgatcggctccctctcctccaccacagactactcctccttcatgagccccaacaaggatctggaaaaggaaaaaaagttttccttccatagagaaaactacaaaaaattcgtcgaggccagcaagccctacatgaggtactatggaaaggtgtttattagagacgtgaagaaaagcaagctctccaccggaaagggcgagaagattgaggtgatgtatagatccgacgaggaaattttcaccatttttcaaattctgagctatgtgagacaatccatcatgcacaacgacatcggaaacaagagcagcattctggccatcgaaaagtaccccgccagattcgtcggctttctgagcgacctcctcaaaaccaagacaaacgatgtcaatagaatgttcattgacaataacagccaaacaaacttctgggtgctcttcagcatcttcggactgcaagatcacaccagcggagccgacaagatctgtagaaatttctacgacttcgtgatcaaggccgacagcaaaaacctcggattctccctcaagaagatcagagagctgatgctcgatctgcctaacgccaacatgctgagagatcaccaattcgataccgtgaggagcaagttttataccctcctcgacttcattatctatcaacactatctcgaggagaagtccagaatcgacaacatggtggagaagctgaggatgaccctcaaggaagaggaaaaggaagtgctctacgctgccgaggccaagattgtgtggaatgccatcggagccaaggtcatcaacaagctcgtgcccatgatgaatggcgatgctctgaaggagatcaagagaaaaaatagagatagaaagctccctcagagcgtgatcgccacagtgcaagtgaattccgacgccaatgtgttctccggactgatctactttctgacactgtttctcgacggcaaggagatcaacgagatggtgagcaacctcatcaccaagttcgagaacattgactctctgctgcatgtcgatagagaaatctacaagtccgacgagaaggatctggatctcgagatcgagaagctggccctctttttcaagggcgtggtgaggcctaatgccaagacagataccggcgccggagagatctccaagagcttctccatcttccagagcgccgaaaggattatcgaggaactgaagttcattaagaacgtcacaagaatggataacgagatcttccctagcgagggcgtgttcctcgatgccgctaacgtgctcggcgtcagaggcgatgactttgactttagcaatgagtttgtcggagacgatctgcacagcgacgctaataagaagattattaacaagatcaatggcaccaaggaggacagaaatctgaggaactttattattaataacgtcgtgaagagcagaaggtttcagtatatcgctagacacatgaatacacactacgtcaagcagctcgccaataacgagacactgaatagattcgtgctgaacaagatgggagacgccaagatcatcaataggtactacgagtccatctccggcaatacccccaatattgaggtcagaagccaaatcgactacctcgtcaagagactgaggagcttcagcttcgaagacctcaacgacgtcaagcaaaaggtgagacccggcaccaatgagagcatcgagaaggagaagaaaaaggccctcgtcggactgtgcctcacaattcagtacctcgtgtataaaaatctggtgaatatcaacgctaggtacaccaccgctttctactgtctggagagggactccaaactgaaaggctttggcgtggacgtgtggagagatttcgaatcctacaccgctctgaccaatcactttatcaaagaaggctatctgcccgtgagaaaggctgaaattctgagggccaatctgaagcatctggactgtgaagacggcttcaaatattacagaaaccaagtgacccacctcaacgccattagagtcgcctataaatatatcaacgagattaaatccgtgcacagctacttcgccctctaccactacatcatgcagagacatctgtacgacagcctccaagccaaagctaaggactcctccggcttcgtgatcgacgctctgaagaaatccttcgagcacaagatctacagcaaagatctgctccacgtgctgcactcccccttcggctataataccgctagatataaaaatctgagcatcgaggccctcttcgacaagaacgaatccagacccgaggtgaatcccctctccaccaatgat

SEQ ID NO: 539 - DNA, 3982 bp, Artificial Sequence
  Seq212-CTGguide3- whole nucleotide sequence from U6 promoter to SV-40 poly A
gagggcctatttcccatgattccttcatatttgcatatacgatacaaggctgttagagagataattagaattaatttgactgtaaacacaaagatattagtacaaaatacgtgacgtagaaagtaataatttcttgggtagtttgcagttttaaaattatgttttaaaatggactatcatatgcttaccgtaacttgaaagtatttcgatttcttggctttatatatcttgtggaaaggacgaaacaccgtacaatagccctgcagtaaggcagggttctaagaccagcagcagcagcagcagcagcagcattttttccaccacactggactagtggatctctgcagccctccttaggtcttgaaaggagtgggaattggctccggtgcccgtcagtgggcagagcgcacatcgcccacagtccccgagaagttggggggaggggtcggcaattgatccggtgcctagagaaggtggcgcggggtaaactgggaaagtgatgtcgtgtactggctccgcctttttcccgagggtgggggagaaccgtatataagtgcagtagtcgccgtgaacgttctttttcgcaacgggtttgccgccagaacacaggtcacgcttaactaacgcgtgccgccaccatgaagaagaagcaccagagcgccgccgagaagaggcaagtgaagaagctcaagaatcaagagaaggcccagaagtacgctagcgagccttcccccctccagagcgatacagctggcgtggaatgctcccagaaaaagacagtcgtcagccacattgccagctccaagacactggccaaggctatgggactcaaatccacactggtcatgggcgacaagctggtcatcaccagctttgctgctagcaaggctgtcggaggcgctggctacaaaagcgctaacattgaaaaaatcacagatctgcaaggaagggtcattgaggagcacgaaaggatgtttagcgccgatgtcggagagaaaaatatcgaactgagcaagaatgactgccacaccaacgtcaacaaccccgtggtgaccaacatcggaaaggattacatcggactgaaatctaggctggagcaagagtttttcggcaagacattcgagaatgacaatctgcatgtgcagctggcctacaatatcctcgacatcaagaaaattctgggaacctatgtgaacaatatcatttatatcttctacaatctgaatagggctggcaccggcagagatgagaggatgtatgacgacctcatcggcacactgtacgcttacaaacccatggaggctcaacagacctatctgctcaaaggcgacaaggatatgaggaggtttgaggaggtgaaacagctgctgcaaaacacctccgcttactatgtgtattacggcacactgttcgagaaggtgaaggctaagagcaagaaggaacagagggctaaggaggccgaaatcgacgcttgtaccgcccataactacgatgtgctgagactgctgtccctcatgaggcagctgtgcatgcactccgtcgctggaacagcctttaagctggctgagtccgctctgttcaacattgaggatgtgctcagcgccgatctgaaggaaatcctcgatgaagccttctccggcgccgtgaacaagctcaatgacggattcgtgcagcactccggcaacaatctgtacgtgctccagcagctgtaccctaatgagaccatcgagagaatcgccgagaagtactacagactcaccgtgaggaaggaggatctgaacatgggagtcaacattaaaaagctgagggagctgatcgtgggccaatactttcccgaggtcctcgacaaagaatacgacctctccaagaatggagacagcgtggtgacatacagaagcaagatttataccgtgatgaattacattctgctgtattacctcgaggaccacgactccagcagagaaagcatggtcgaagctctgagacaaaacagagagggcgatgaaggcaaggaggagatctatagacagtttgccaagaaggtgtggaacggcgtgtccggactgtttggcgtgtgtctgaacctcttcaagaccgaaaagagaaacaagtttaggagcaaagtcgccctccccgatgtgtccggcgctgcctatatgctctcctccgagaacatcgactactttgtcaagatgctcttctttgtgtgtaagtttctggatggcaaagaaatcaacgagctgctgtgcgctctgatcaacaaatttgataatattgccgatattctggatgctgccgctcaatgtggctcctccgtctggttcgtggacagctataggttcttcgagagatctaggaggattagcgcccagattagaatcgtgaagaacatcgcttccaaggattttaagaaatccaagaaggattccgatgagagctaccccgagcagctgtatctggatgctctggctctgctcggagacgtcatctccaagtacaagcagaatagagatggcagcgtcgtcatcgatgaccaaggcaatgccgtgctgacagagcaatacaagaggtttagatatgaatttttcgaggagatcaagagggacgaaagcggcggcatcaagtacaagaagtccggaaaacccgagtacaaccatcagagaaggaattttattctgaataatgtgctgaaaagcaaatggtttttctatgtggtgaagtacaataggcccagcagctgcagagaactgatgaagaataaggaaattctgaggttcgtgctgagagacatccccgactcccaagtgagaagatactttaaggccgtccaaggagaggaagcttacgctagcgccgaagctatgaggacaagactggtcgacgctctgtcccaatttagcgtcacagcttgtctggatgaagtgggcggcatgacagacaaggaattcgcctcccagagggccgtcgatagcaaagaaaaactgagagccatcatcagactgtatctgacagtcgcctatctgattaccaagagcatggtgaaggtgaatacaaggtttagcattgcctttagcgtgctggagagggactactatctgctcattgacggcaagaagaaatccagcgactacaccggagaggatatgctggctctgaccagaaaatttgtgggcgaagatgctggactgtatagagagtggaaagagaagaacgctgaagccaaggacaaatattttgacaaggccgaaaggaagaaggtgctgagacagaacgataagatgatcagaaagatgcacttcacaccccactccctcaattacgtccaaaagaatctcgaaagcgtccagagcaacggactggccgccgtcatcaaggaatatagaaatgccgtcgctcacctcaatatcatcaatagactggacgagtacattggctccgctagggctgatagctactactctctgtactgttactgcctccaaatgtatctgagcaagaacttcagcgtgggctacctcatcaacgtgcaaaagcagctggaggagcaccacacctacatgaaggatctcatgtggctgctcaacatccccttcgcttacaacctcgccagatacaaaaatctgtccaacgaaaaactcttttacgacgaggaagccgccgccgaaaaggctgacaaggctgagaacgagagaggcgaaggaagccccaagaagaaaaggaaggtctaaatccgatccaccggatctagataactgatcataatcagccataccacatttgtagaggttttacttgctttaaaaaacctcccacacctccccctgaacctgaaacataaaatgaatgcaattgttgttgttaacttgtttattgcagcttataatggttacaaataaagcaatagcatcacaaatttcacaaataaagcatttttttcactgcattctagttgtggtttgtccaaactcatcaatgtatctta

SEQ ID NO: 540 - DNA, 3057 bp, Artificial Sequence
  Cas13d seq212
aagaagaagcaccagagcgccgccgagaagaggcaagtgaagaagctcaagaatcaagagaaggcccagaagtacgctagcgagccttcccccctccagagcgatacagctggcgtggaatgctcccagaaaaagacagtcgtcagccacattgccagctccaagacactggccaaggctatgggactcaaatccacactggtcatgggcgacaagctggtcatcaccagctttgctgctagcaaggctgtcggaggcgctggctacaaaagcgctaacattgaaaaaatcacagatctgcaaggaagggtcattgaggagcacgaaaggatgtttagcgccgatgtcggagagaaaaatatcgaactgagcaagaatgactgccacaccaacgtcaacaaccccgtggtgaccaacatcggaaaggattacatcggactgaaatctaggctggagcaagagtttttcggcaagacattcgagaatgacaatctgcatgtgcagctggcctacaatatcctcgacatcaagaaaattctgggaacctatgtgaacaatatcatttatatcttctacaatctgaatagggctggcaccggcagagatgagaggatgtatgacgacctcatcggcacactgtacgcttacaaacccatggaggctcaacagacctatctgctcaaaggcgacaaggatatgaggaggtttgaggaggtgaaacagctgctgcaaaacacctccgcttactatgtgtattacggcacactgttcgagaaggtgaaggctaagagcaagaaggaacagagggctaaggaggccgaaatcgacgcttgtaccgcccataactacgatgtgctgagactgctgtccctcatgaggcagctgtgcatgcactccgtcgctggaacagcctttaagctggctgagtccgctctgttcaacattgaggatgtgctcagcgccgatctgaaggaaatcctcgatgaagccttctccggcgccgtgaacaagctcaatgacggattcgtgcagcactccggcaacaatctgtacgtgctccagcagctgtaccctaatgagaccatcgagagaatcgccgagaagtactacagactcaccgtgaggaaggaggatctgaacatgggagtcaacattaaaaagctgagggagctgatcgtgggccaatactttcccgaggtcctcgacaaagaatacgacctctccaagaatggagacagcgtggtgacatacagaagcaagatttataccgtgatgaattacattctgctgtattacctcgaggaccacgactccagcagagaaagcatggtcgaagctctgagacaaaacagagagggcgatgaaggcaaggaggagatctatagacagtttgccaagaaggtgtggaacggcgtgtccggactgtttggcgtgtgtctgaacctcttcaagaccgaaaagagaaacaagtttaggagcaaagtcgccctccccgatgtgtccggcgctgcctatatgctctcctccgagaacatcgactactttgtcaagatgctcttctttgtgtgtaagtttctggatggcaaagaaatcaacgagctgctgtgcgctctgatcaacaaatttgataatattgccgatattctggatgctgccgctcaatgtggctcctccgtctggttcgtggacagctataggttcttcgagagatctaggaggattagcgcccagattagaatcgtgaagaacatcgcttccaaggattttaagaaatccaagaaggattccgatgagagctaccccgagcagctgtatctggatgctctggctctgctcggagacgtcatctccaagtacaagcagaatagagatggcagcgtcgtcatcgatgaccaaggcaatgccgtgctgacagagcaatacaagaggtttagatatgaatttttcgaggagatcaagagggacgaaagcggcggcatcaagtacaagaagtccggaaaacccgagtacaaccatcagagaaggaattttattctgaataatgtgctgaaaagcaaatggtttttctatgtggtgaagtacaataggcccagcagctgcagagaactgatgaagaataaggaaattctgaggttcgtgctgagagacatccccgactcccaagtgagaagatactttaaggccgtccaaggagaggaagcttacgctagcgccgaagctatgaggacaagactggtcgacgctctgtcccaatttagcgtcacagcttgtctggatgaagtgggcggcatgacagacaaggaattcgcctcccagagggccgtcgatagcaaagaaaaactgagagccatcatcagactgtatctgacagtcgcctatctgattaccaagagcatggtgaaggtgaatacaaggtttagcattgcctttagcgtgctggagagggactactatctgctcattgacggcaagaagaaatccagcgactacaccggagaggatatgctggctctgaccagaaaatttgtgggcgaagatgctggactgtatagagagtggaaagagaagaacgctgaagccaaggacaaatattttgacaaggccgaaaggaagaaggtgctgagacagaacgataagatgatcagaaagatgcacttcacaccccactccctcaattacgtccaaaagaatctcgaaagcgtccagagcaacggactggccgccgtcatcaaggaatatagaaatgccgtcgctcacctcaatatcatcaatagactggacgagtacattggctccgctagggctgatagctactactctctgtactgttactgcctccaaatgtatctgagcaagaacttcagcgtgggctacctcatcaacgtgcaaaagcagctggaggagcaccacacctacatgaaggatctcatgtggctgctcaacatccccttcgcttacaacctcgccagatacaaaaatctgtccaacgaaaaactcttttacgacgaggaagccgccgccgaaaaggctgacaaggctgagaacgagagaggcgaa

SEQ ID NO: 541 - RNA, 7 nt, Artificial Sequence
  box c motif
rugauga

SEQ ID NO: 542 - RNA, 4 nt, Artificial Sequence
  box d motif
cuga

SEQ ID NO: 543 - protein, 21 aa, Homo sapiens
DRVLKRSAEGSNPPKPLKKLR

SEQ ID NO: 544 - protein, 10 aa, Homo sapiens
LPPLERLTLD

SEQ ID NO: 545 - protein, 10 aa, Homo sapiens
LALKLAGLDI

SEQ ID NO: 546 - DNA, 9 bp, Artificial Sequence
  kozak sequence
agaaccatg

SEQ ID NO: 547 - protein, 558 aa, Artificial Sequence
  14Pumby targeting CUG frame 3
GRSRLLEDFRNNRYPNLQLREIAGHTEQLVQDQYGSYVIEHVLEHGRPEDKSKIVAEIRGHTEQLVQDQYGNYVIQHVLEHGRPEDKSKIVAEIRGHTEQLVQDQYGSYVIRHVLEHGRPEDKSKIVAEIRGHTEQLVQDQYGSYVIEHVLEHGRPEDKSKIVAEIRGHTEQLVQDQYGNYVIQHVLEHGRPEDKSKIVAEIRGHTEQLVQDQYGSYVIRHVLEHGRPEDKSKIVAEIRGHTEQLVQDQYGSYVIEHVLEHGRPEDKSKIVAEIRGHTEQLVQDQYGNYVIQHVLEHGRPEDKSKIVAEIRGHTEQLVQDQYGSYVIRHVLEHGRPEDKSKIVAEIRGHTEQLVQDQYGSYVIEHVLEHGRPEDKSKIVAEIRGHTEQLVQDQYGNYVIQHVLEHGRPEDKSKIVAEIRGHTEQLVQDQYGSYVIRHVLEHGRPEDKSKIVAEIRGHTEQLVQDQYGSYVIEHVLEHGRPEDKSKIVAEIRGHTEQLVQDQYGNYVIQHVLEHGRPEDKSKIVAEIRGHIATLRKYTYGKHILAKLEKYYMKNGVDLG

SEQ ID NO: 548 - protein, 558 aa, Artificial Sequence
  14Pumby targeting CUG frame 1
GRSRLLEDFRNNRYPNLQLREIAGHTEQLVQDQYGNYVIQHVLEHGRPEDKSKIVAEIRGHTEQLVQDQYGSYVIRHVLEHGRPEDKSKIVAEIRGHTEQLVQDQYGSYVIEHVLEHGRPEDKSKIVAEIRGHTEQLVQDQYGNYVIQHVLEHGRPEDKSKIVAEIRGHTEQLVQDQYGSYVIRHVLEHGRPEDKSKIVAEIRGHTEQLVQDQYGSYVIEHVLEHGRPEDKSKIVAEIRGHTEQLVQDQYGNYVIQHVLEHGRPEDKSKIVAEIRGHTEQLVQDQYGSYVIRHVLEHGRPEDKSKIVAEIRGHTEQLVQDQYGSYVIEHVLEHGRPEDKSKIVAEIRGHTEQLVQDQYGNYVIQHVLEHGRPEDKSKIVAEIRGHTEQLVQDQYGSYVIRHVLEHGRPEDKSKIVAEIRGHTEQLVQDQYGSYVIEHVLEHGRPEDKSKIVAEIRGHTEQLVQDQYGNYVIQHVLEHGRPEDKSKIVAEIRGHTEQLVQDQYGSYVIRHVLEHGRPEDKSKIVAEIRGHIATLRKYTYGKHILAKLEKYYMKNGVDLG

SEQ ID NO: 549 - protein, 349 aa, Artificial Sequence
  8PUF - frame 2
GRSRLLEDFRNNRYPNLQLREIAGHIMEFSQDQHGSRFIRLKLERATPAERQLVFNEILQAAYQLMVDVFGSYVIEKFFEFGSLEQKLALAERIRGHVLSLALQMYGNRVIQKALEFIPSDQQNEMVRELDGHVLKCVKDQNGSYVVRKCIECVQPQSLQFIIDAFKGQVFALSTHPYGSRVIERILEHCLPDQTLPILEELHQHTEQLVQDQYGNYVIQHVLEHGRPEDKSKIVAEIRGNVLVLSQHKFASYVVRKCVTHASRTERAVLIDEVCTMNDGPHSALYTMMKDQYASYVVEKMIDVAEPGQRKIVMHKIRPHIATLRKYTYGKHILAKLEKYYMKNGVDLG

SEQ ID NO: 550 - protein, 565 aa, Artificial Sequence
  14PUF - frame 2
GRSRLLEDFRNNRYPNLQLREIAGHIMEFSQDQHGSRFIRLKLERATPAERQLVFNEILQAAYQLMVDVFGSYVIEKFFEFGSLEQKLALAERIRGHVLSLALQMYGNRVIQKALEFIPSDQQNEMVRELDGHVLKCVKDQNGSYVVRKCIECVQPQSLQFIIDAFKGQVFALSTHPYGSRVIERILEHCLPDQTLPILEELHQHIMEFSQDQHGNRFIQLKLERATPAERQLVFNEILQAAYQLMVDVFGSYVIRKFFEFGSLEQKLALAERIRGHVLSLALQMYGSRVIEKALEFIPSDQQNEMVRELDGHVLKCVKDQNGNHVVQKCIECVQPQSLQFIIDAFKGQVFALSTHPYGSRVIRRILEHCLPDQTLPILEELHQHTEQLVQDQYGSYVIEHVLEHGRPEDKSKIVAEIRGHTEQLVQDQYGNYVIQHVLEHGRPEDKSKIVAEIRGNVLVLSQHKFASYVVRKCVTHASRTERAVLIDEVCTMNDGPHSALYTMMKDQYASYVVEKMIDVAEPGQRKIVMHKIRPHIATLRKYTYGKHILAKLEKYYMKNGVDLG

SEQ ID NO: 551 - protein, 565 aa, Artificial Sequence
  14PUF - frame 2
GRSRLLEDFRNNRYPNLQLREIAGHIMEFSQDQHGSRFIRLKLERATPAERQLVFNEILQAAYQLMVDVFGSYVIEKFFEFGSLEQKLALAERIRGHVLSLALQMYGNRVIQKALEFIPSDQQNEMVRELDGHVLKCVKDQNGSYVVRKCIECVQPQSLQFIIDAFKGQVFALSTHPYGSRVIERILEHCLPDQTLPILEELHQHTEQLVQDQYGNYVIQHVLEHGRPEDKSKIVAEIRGHIMEFSQDQHGSRFIRLKLERATPAERQLVFNEILQAAYQLMVDVFGSYVIEKFFEFGSLEQKLALAERIRGHVLSLALQMYGNRVIQKALEFIPSDQQNEMVRELDGHVLKCVKDQNGSYVVRKCIECVQPQSLQFIIDAFKGQVFALSTHPYGSRVIERILEHCLPDQTLPILEELHQHTEQLVQDQYGNYVIQHVLEHGRPEDKSKIVAEIRGNVLVLSQHKFASYVVRKCVTHASRTERAVLIDEVCTMNDGPHSALYTMMKDQYASYVVEKMIDVAEPGQRKIVMHKIRPHIATLRKYTYGKHILAKLEKYYMKNGVDLG

SEQ ID NO: 552 - protein, 608 aa, Artificial Sequence
  15PUF - frame 2
GRSRLLEDFRNNRYPNLQLREIAGHIMEFSQDQHGNRFIQLKLERATPAERQLVFNEILQAAYQLMVDVFGSYVIRKFFEFGSLEQKLALAERIRGHVLSLALQMYGSRVIEKALEFIPSDQQNEMVRELDGHVLKCVKDQNGNHVVQKCIECVQPQSLQFIIDAFKGQVFALSTHPYGSRVIRRILEHCLPDQTLPILEELHQHIMEFSQDQHGSRFIELKLERATPAERQLVFNEILQAAYQLMVDVFGNYVIQKFFEFGSLEQKLALAERIRGHVLSLALQMYGSYVIRKALEFIPSDQQNEMVRELDGHVLKCVKDQNGSYVVEKCIECVQPQSLQFIIDAFKGQVFALSTHPYGNRVIQRILEHCLPDQTLPILEELHQHTEQLVQDQYGSYVIRHVLEHGRPEDKSKIVAEIRGNVLVLSQHKFASNVVEKCVTHASRTERAVLIDEVCTMNDGPHSHTEQLVQDQYGNYVIQHVLEHGRPEDKSKIVAEIRGNVLVLSQHKFASYVVRKCVTHASRTERAVLIDEVCTMNDGPHSALYTMMKDQYASYVVEKMIDVAEPGQRKIVMHKIRPHIATLRKYTYGKHILAKLEKYYMKNGVDLG

SEQ ID NO: 553 - protein, 608 aa, Artificial Sequence
  15PUF - frame 2
GRSRLLEDFRNNRYPNLQLREIAGHIMEFSQDQHGNRFIQLKLERATPAERQLVFNEILQAAYQLMVDVFGSYVIRKFFEFGSLEQKLALAERIRGHVLSLALQMYGSRVIEKALEFIPSDQQNEMVRELDGHVLKCVKDQNGNHVVQKCIECVQPQSLQFIIDAFKGQVFALSTHPYGSRVIRRILEHCLPDQTLPILEELHQHTEQLVQDQYGSYVIEHVLEHGRPEDKSKIVAEIRGHIMEFSQDQHGNRFIQLKLERATPAERQLVFNEILQAAYQLMVDVFGSYVIRKFFEFGSLEQKLALAERIRGHVLSLALQMYGSRVIEKALEFIPSDQQNEMVRELDGHVLKCVKDQNGNHVVQKCIECVQPQSLQFIIDAFKGQVFALSTHPYGSRVIRRILEHCLPDQTLPILEELHQHTEQLVQDQYGSYVIEHVLEHGRPEDKSKIVAEIRGNVLVLSQHKFANNVVQKCVTHASRTERAVLIDEVCTMNDGPHSNVLVLSQHKFASYVVRKCVTHASRTERAVLIDEVCTMNDGPHSALYTMMKDQYASYVVEKMIDVAEPGQRKIVMHKIRPHIATLRKYTYGKHILAKLEKYYMKNGVDLG

SEQ ID NO: 554 - protein, 608 aa, Artificial Sequence
  15PUF - frame 2
GRSRLLEDFRNNRYPNLQLREIAGHIMEFSQDQHGNRFIQLKLERATPAERQLVFNEILQAAYQLMVDVFGSYVIRKFFEFGSLEQKLALAERIRGHVLSLALQMYGSRVIEKALEFIPSDQQNEMVRELDGHVLKCVKDQNGNHVVQKCIECVQPQSLQFIIDAFKGQVFALSTHPYGSRVIRRILEHCLPDQTLPILEELHQHTEQLVQDQYGSYVIEHVLEHGRPEDKSKIVAEIRGNVLVLSQHKFANNVVQKCVTHASRTERAVLIDEVCTMNDGPHSHIMEFSQDQHGSRFIRLKLERATPAERQLVFNEILQAAYQLMVDVFGSYVIEKFFEFGSLEQKLALAERIRGHVLSLALQMYGNRVIQKALEFIPSDQQNEMVRELDGHVLKCVKDQNGSYVVRKCIECVQPQSLQFIIDAFKGQVFALSTHPYGSRVIERILEHCLPDQTLPILEELHQHTEQLVQDQYGNYVIQHVLEHGRPEDKSKIVAEIRGNVLVLSQHKFASYVVRKCVTHASRTERAVLIDEVCTMNDGPHSALYTMMKDQYASYVVEKMIDVAEPGQRKIVMHKIRPHIATLRKYTYGKHILAKLEKYYMKNGVDLG

SEQ ID NO: 555 - protein, 644 aa, Artificial Sequence
  16PUF - frame 2
GRSRLLEDFRNNRYPNLQLREIAGHIMEFSQDQHGSRFIELKLERATPAERQLVFNEILQAAYQLMVDVFGNYVIQKFFEFGSLEQKLALAERIRGHVLSLALQMYGSYVIRKALEFIPSDQQNEMVRELDGHVLKCVKDQNGSYVVEKCIECVQPQSLQFIIDAFKGQVFALSTHPYGNRVIQRILEHCLPDQTLPILEELHQHIMEFSQDQHGSRFIRLKLERATPAERQLVFNEILQAAYQLMVDVFGSYVIEKFFEFGSLEQKLALAERIRGHVLSLALQMYGNRVIQKALEFIPSDQQNEMVRELDGHVLKCVKDQNGSYVVRKCIECVQPQSLQFIIDAFKGQVFALSTHPYGSRVIERILEHCLPDQTLPILEELHQHTEQLVQDQYGNYVIQHVLEHGRPEDKSKIVAEIRGNVLVLSQHKFASYVVRKCVTHASRTERAVLIDEVCTMNDGPHSALYTMMKDQYASYVVEKMIDVAEPGQRKIVMHKIRPHTEQLVQDQYGNYVIQHVLEHGRPEDKSKIVAEIRGNVLVLSQHKFASYVVRKCVTHASRTERAVLIDEVCTMNDGPHSALYTMMKDQYASYVVEKMIDVAEPGQRKIVMHKIRPHIATLRKYTYGKHILAKLEKYYMKNGVDLG

SEQ ID NO: 556 - protein, 644 aa, Artificial Sequence
  16PUF - frame 2
GRSRLLEDFRNNRYPNLQLREIAGHIMEFSQDQHGSRFIELKLERATPAERQLVFNEILQAAYQLMVDVFGNYVIQKFFEFGSLEQKLALAERIRGHVLSLALQMYGSYVIRKALEFIPSDQQNEMVRELDGHVLKCVKDQNGSYVVEKCIECVQPQSLQFIIDAFKGQVFALSTHPYGNRVIQRILEHCLPDQTLPILEELHQHTEQLVQDQYGSYVIRHVLEHGRPEDKSKIVAEIRGHIMEFSQDQHGSRFIELKLERATPAERQLVFNEILQAAYQLMVDVFGNYVIQKFFEFGSLEQKLALAERIRGHVLSLALQMYGSYVIRKALEFIPSDQQNEMVRELDGHVLKCVKDQNGSYVVEKCIECVQPQSLQFIIDAFKGQVFALSTHPYGNRVIQRILEHCLPDQTLPILEELHQHTEQLVQDQYGSYVIRHVLEHGRPEDKSKIVAEIRGNVLVLSQHKFASNVVEKCVTHASRTERAVLIDEVCTMNDGPHSALYTMMKDQYANYVVQKMIDVAEPGQRKIVMHKIRPNVLVLSQHKFASYVVRKCVTHASRTERAVLIDEVCTMNDGPHSALYTMMKDQYASYVVEKMIDVAEPGQRKIVMHKIRPHIATLRKYTYGKHILAKLEKYYMKNGVDLG

SEQ ID NO: 557 - protein, 644 aa, Artificial Sequence
  16PUF - frame 2
GRSRLLEDFRNNRYPNLQLREIAGHIMEFSQDQHGSRFIELKLERATPAERQLVFNEILQAAYQLMVDVFGNYVIQKFFEFGSLEQKLALAERIRGHVLSLALQMYGSYVIRKALEFIPSDQQNEMVRELDGHVLKCVKDQNGSYVVEKCIECVQPQSLQFIIDAFKGQVFALSTHPYGNRVIQRILEHCLPDQTLPILEELHQHTEQLVQDQYGSYVIRHVLEHGRPEDKSKIVAEIRGNVLVLSQHKFASNVVEKCVTHASRTERAVLIDEVCTMNDGPHSALYTMMKDQYANYVVQKMIDVAEPGQRKIVMHKIRPHIMEFSQDQHGSRFIRLKLERATPAERQLVFNEILQAAYQLMVDVFGSYVIEKFFEFGSLEQKLALAERIRGHVLSLALQMYGNRVIQKALEFIPSDQQNEMVRELDGHVLKCVKDQNGSYVVRKCIECVQPQSLQFIIDAFKGQVFALSTHPYGSRVIERILEHCLPDQTLPILEELHQHTEQLVQDQYGNYVIQHVLEHGRPEDKSKIVAEIRGNVLVLSQHKFASYVVRKCVTHASRTERAVLIDEVCTMNDGPHSALYTMMKDQYASYVVEKMIDVAEPGQRKIVMHKIRPHIATLRKYTYGKHILAKLEKYYMKNGVDLG

SEQ ID NO: 558 - protein, 558 aa, Artificial Sequence
  14Pumby targeting CUG frame 2
GRSRLLEDFRNNRYPNLQLREIAGHTEQLVQDQYGSYVIRHVLEHGRPEDKSKIVAEIRGHTEQLVQDQYGSYVIEHVLEHGRPEDKSKIVAEIRGHTEQLVQDQYGNYVIQHVLEHGRPEDKSKIVAEIRGHTEQLVQDQYGSYVIRHVLEHGRPEDKSKIVAEIRGHTEQLVQDQYGSYVIEHVLEHGRPEDKSKIVAEIRGHTEQLVQDQYGNYVIQHVLEHGRPEDKSKIVAEIRGHTEQLVQDQYGSYVIRHVLEHGRPEDKSKIVAEIRGHTEQLVQDQYGSYVIEHVLEHGRPEDKSKIVAEIRGHTEQLVQDQYGNYVIQHVLEHGRPEDKSKIVAEIRGHTEQLVQDQYGSYVIRHVLEHGRPEDKSKIVAEIRGHTEQLVQDQYGSYVIEHVLEHGRPEDKSKIVAEIRGHTEQLVQDQYGNYVIQHVLEHGRPEDKSKIVAEIRGHTEQLVQDQYGSYVIRHVLEHGRPEDKSKIVAEIRGHTEQLVQDQYGSYVIEHVLEHGRPEDKSKIVAEIRGHIATLRKYTYGKHILAKLEKYYMKNGVDLG

SEQ ID NO: 559 - protein, 552 aa, Artificial Sequence
  8PUF - frame 3 - entire construct
PKKKRKVGRSRLLEDFRNNRYPNLQLREIAGHIMEFSQDQHGSRFIELKLERATPAERQLVFNEILQAAYQLMVDVFGNYVIQKFFEFGSLEQKLALAERIRGHVLSLALQMYGSYVIRKALEFIPSDQQNEMVRELDGHVLKCVKDQNGSYVVEKCIECVQPQSLQFIIDAFKGQVFALSTHPYGNRVIQRILEHCLPDQTLPILEELHQHTEQLVQDQYGSYVIRHVLEHGRPEDKSKIVAEIRGNVLVLSQHKFASNVVEKCVTHASRTERAVLIDEVCTMNDGPHSALYTMMKDQYANYVVQKMIDVAEPGQRKIVMHKIRPHIATLRKYTYGKHILAKLEKYYMKNGVDLGVDTANGSGGGTPKAPNLEPPLPEEEKEGSDLRPVVIDGSNVAMSHGNKEVFSCRGILLAVNWFLERGHTDITVFVPSWRKEQPRPDVPITDQHILRELEKKKILVFTPSRRVGGKRVVCYDDRFIVKLAYESDGIVVSNDTYRDLQGERQEWKRFIEERLLMYSFVNDKFMPPDDPLGRHGPSLDNFLRKKPLTLE

SEQ ID NO: 560 - protein, 768 aa, Artificial Sequence
  14PUF - frame 3 - entire construct
PKKKRKVGRSRLLEDFRNNRYPNLQLREIAGHIMEFSQDQHGSRFIELKLERATPAERQLVFNEILQAAYQLMVDVFGNYVIQKFFEFGSLEQKLALAERIRGHVLSLALQMYGSYVIRKALEFIPSDQQNEMVRELDGHVLKCVKDQNGSYVVEKCIECVQPQSLQFIIDAFKGQVFALSTHPYGNRVIQRILEHCLPDQTLPILEELHQHIMEFSQDQHGSRFIRLKLERATPAERQLVFNEILQAAYQLMVDVFGSYVIEKFFEFGSLEQKLALAERIRGHVLSLALQMYGNRVIQKALEFIPSDQQNEMVRELDGHVLKCVKDQNGSYVVRKCIECVQPQSLQFIIDAFKGQVFALSTHPYGSRVIERILEHCLPDQTLPILEELHQHTEQLVQDQYGNYVIQHVLEHGRPEDKSKIVAEIRGHTEQLVQDQYGSYVIRHVLEHGRPEDKSKIVAEIRGNVLVLSQHKFASNVVEKCVTHASRTERAVLIDEVCTMNDGPHSALYTMMKDQYANYVVQKMIDVAEPGQRKIVMHKIRPHIATLRKYTYGKHILAKLEKYYMKNGVDLGVDTANGSGGGTPKAPNLEPPLPEEEKEGSDLRPVVIDGSNVAMSHGNKEVFSCRGILLAVNWFLERGHTDITVFVPSWRKEQPRPDVPITDQHILRELEKKKILVFTPSRRVGGKRVVCYDDRFIVKLAYESDGIVVSNDTYRDLQGERQEWKRFIEERLLMYSFVNDKFMPPDDPLGRHGPSLDNFLRKKPLTLE

SEQ ID NO: 561 - protein, 768 aa, Artificial Sequence
  14PUF - frame 3 - entire construct
PKKKRKVGRSRLLEDFRNNRYPNLQLREIAGHIMEFSQDQHGSRFIELKLERATPAERQLVFNEILQAAYQLMVDVFGNYVIQKFFEFGSLEQKLALAERIRGHVLSLALQMYGSYVIRKALEFIPSDQQNEMVRELDGHVLKCVKDQNGSYVVEKCIECVQPQSLQFIIDAFKGQVFALSTHPYGNRVIQRILEHCLPDQTLPILEELHQHTEQLVQDQYGSYVIRHVLEHGRPEDKSKIVAEIRGHIMEFSQDQHGSRFIELKLERATPAERQLVFNEILQAAYQLMVDVFGNYVIQKFFEFGSLEQKLALAERIRGHVLSLALQMYGSYVIRKALEFIPSDQQNEMVRELDGHVLKCVKDQNGSYVVEKCIECVQPQSLQFIIDAFKGQVFALSTHPYGNRVIQRILEHCLPDQTLPILEELHQHTEQLVQDQYGSYVIRHVLEHGRPEDKSKIVAEIRGNVLVLSQHKFASNVVEKCVTHASRTERAVLIDEVCTMNDGPHSALYTMMKDQYANYVVQKMIDVAEPGQRKIVMHKIRPHIATLRKYTYGKHILAKLEKYYMKNGVDLGVDTANGSGGGTPKAPNLEPPLPEEEKEGSDLRPVVIDGSNVAMSHGNKEVFSCRGILLAVNWFLERGHTDITVFVPSWRKEQPRPDVPITDQHILRELEKKKILVFTPSRRVGGKRVVCYDDRFIVKLAYESDGIVVSNDTYRDLQGERQEWKRFIEERLLMYSFVNDKFMPPDDPLGRHGPSLDNFLRKKPLTLE

SEQ ID NO: 562 - protein, 811 aa, Artificial Sequence
  15PUF - frame 3 - entire construct
PKKKRKVGRSRLLEDFRNNRYPNLQLREIAGHIMEFSQDQHGSRFIRLKLERATPAERQLVFNEILQAAYQLMVDVFGSYVIEKFFEFGSLEQKLALAERIRGHVLSLALQMYGNRVIQKALEFIPSDQQNEMVRELDGHVLKCVKDQNGSYVVRKCIECVQPQSLQFIIDAFKGQVFALSTHPYGSRVIERILEHCLPDQTLPILEELHQHIMEFSQDQHGNRFIQLKLERATPAERQLVFNEILQAAYQLMVDVFGSYVIRKFFEFGSLEQKLALAERIRGHVLSLALQMYGSRVIEKALEFIPSDQQNEMVRELDGHVLKCVKDQNGNHVVQKCIECVQPQSLQFIIDAFKGQVFALSTHPYGSRVIRRILEHCLPDQTLPILEELHQHTEQLVQDQYGSYVIEHVLEHGRPEDKSKIVAEIRGNVLVLSQHKFANNVVQKCVTHASRTERAVLIDEVCTMNDGPHSHTEQLVQDQYGSYVIRHVLEHGRPEDKSKIVAEIRGNVLVLSQHKFASNVVEKCVTHASRTERAVLIDEVCTMNDGPHSALYTMMKDQYANYVVQKMIDVAEPGQRKIVMHKIRPHIATLRKYTYGKHILAKLEKYYMKNGVDLGVDTANGSGGGTPKAPNLEPPLPEEEKEGSDLRPVVIDGSNVAMSHGNKEVFSCRGILLAVNWFLERGHTDITVFVPSWRKEQPRPDVPITDQHILRELEKKKILVFTPSRRVGGKRVVCYDDRFIVKLAYESDGIVVSNDTYRDLQGERQEWKRFIEERLLMYSFVNDKFMPPDDPLGRHGPSLDNFLRKKPLTLE

SEQ ID NO: 563 - protein, 811 aa, Artificial Sequence
  15PUF - frame 3 - entire construct
PKKKRKVGRSRLLEDFRNNRYPNLQLREIAGHIMEFSQDQHGSRFIRLKLERATPAERQLVFNEILQAAYQLMVDVFGSYVIEKFFEFGSLEQKLALAERIRGHVLSLALQMYGNRVIQKALEFIPSDQQNEMVRELDGHVLKCVKDQNGSYVVRKCIECVQPQSLQFIIDAFKGQVFALSTHPYGSRVIERILEHCLPDQTLPILEELHQHTEQLVQDQYGNYVIQHVLEHGRPEDKSKIVAEIRGHIMEFSQDQHGSRFIRLKLERATPAERQLVFNEILQAAYQLMVDVFGSYVIEKFFEFGSLEQKLALAERIRGHVLSLALQMYGNRVIQKALEFIPSDQQNEMVRELDGHVLKCVKDQNGSYVVRKCIECVQPQSLQFIIDAFKGQVFALSTHPYGSRVIERILEHCLPDQTLPILEELHQHTEQLVQDQYGNYVIQHVLEHGRPEDKSKIVAEIRGNVLVLSQHKFASYVVRKCVTHASRTERAVLIDEVCTMNDGPHSNVLVLSQHKFASNVVEKCVTHASRTERAVLIDEVCTMNDGPHSALYTMMKDQYANYVVQKMIDVAEPGQRKIVMHKIRPHIATLRKYTYGKHILAKLEKYYMKNGVDLGVDTANGSGGGTPKAPNLEPPLPEEEKEGSDLRPVVIDGSNVAMSHGNKEVFSCRGILLAVNWFLERGHTDITVFVPSWRKEQPRPDVPITDQHILRELEKKKILVFTPSRRVGGKRVVCYDDRFIVKLAYESDGIVVSNDTYRDLQGERQEWKRFIEERLLMYSFVNDKFMPPDDPLGRHGPSLDNFLRKKPLTLE

SEQ ID NO: 564 - protein, 847 aa, Artificial Sequence
  16PUF - frame 3 - entire construct
PKKKRKVGRSRLLEDFRNNRYPNLQLREIAGHIMEFSQDQHGNRFIQLKLERATPAERQLVFNEILQAAYQLMVDVFGSYVIRKFFEFGSLEQKLALAERIRGHVLSLALQMYGSRVIEKALEFIPSDQQNEMVRELDGHVLKCVKDQNGNHVVQKCIECVQPQSLQFIIDAFKGQVFALSTHPYGSRVIRRILEHCLPDQTLPILEELHQHIMEFSQDQHGSRFIELKLERATPAERQLVFNEILQAAYQLMVDVFGNYVIQKFFEFGSLEQKLALAERIRGHVLSLALQMYGSYVIRKALEFIPSDQQNEMVRELDGHVLKCVKDQNGSYVVEKCIECVQPQSLQFIIDAFKGQVFALSTHPYGNRVIQRILEHCLPDQTLPILEELHQHTEQLVQDQYGSYVIRHVLEHGRPEDKSKIVAEIRGNVLVLSQHKFASNVVEKCVTHASRTERAVLIDEVCTMNDGPHSALYTMMKDQYANYVVQKMIDVAEPGQRKIVMHKIRPHTEQLVQDQYGSYVIRHVLEHGRPEDKSKIVAEIRGNVLVLSQHKFASNVVEKCVTHASRTERAVLIDEVCTMNDGPHSALYTMMKDQYANYVVQKMIDVAEPGQRKIVMHKIRPHIATLRKYTYGKHILAKLEKYYMKNGVDLGVDTANGSGGGTPKAPNLEPPLPEEEKEGSDLRPVVIDGSNVAMSHGNKEVFSCRGILLAVNWFLERGHTDITVFVPSWRKEQPRPDVPITDQHILRELEKKKILVFTPSRRVGGKRVVCYDDRFIVKLAYESDGIVVSNDTYRDLQGERQEWKRFIEERLLMYSFVNDKFMPPDDPLGRHGPSLDNFLRKKPLTLE

SEQ ID NO: 565 - protein, 847 aa, Artificial Sequence
  16PUF - frame 3 - entire construct
PKKKRKVGRSRLLEDFRNNRYPNLQLREIAGHIMEFSQDQHGNRFIQLKLERATPAERQLVFNEILQAAYQLMVDVFGSYVIRKFFEFGSLEQKLALAERIRGHVLSLALQMYGSRVIEKALEFIPSDQQNEMVRELDGHVLKCVKDQNGNHVVQKCIECVQPQSLQFIIDAFKGQVFALSTHPYGSRVIRRILEHCLPDQTLPILEELHQHTEQLVQDQYGSYVIEHVLEHGRPEDKSKIVAEIRGHIMEFSQDQHGNRFIQLKLERATPAERQLVFNEILQAAYQLMVDVFGSYVIRKFFEFGSLEQKLALAERIRGHVLSLALQMYGSRVIEKALEFIPSDQQNEMVRELDGHVLKCVKDQNGNHVVQKCIECVQPQSLQFIIDAFKGQVFALSTHPYGSRVIRRILEHCLPDQTLPILEELHQHTEQLVQDQYGSYVIEHVLEHGRPEDKSKIVAEIRGNVLVLSQHKFANNVVQKCVTHASRTERAVLIDEVCTMNDGPHSALYTMMKDQYASYVVRKMIDVAEPGQRKIVMHKIRPNVLVLSQHKFASNVVEKCVTHASRTERAVLIDEVCTMNDGPHSALYTMMKDQYANYVVQKMIDVAEPGQRKIVMHKIRPHIATLRKYTYGKHILAKLEKYYMKNGVDLGVDTANGSGGGTPKAPNLEPPLPEEEKEGSDLRPVVIDGSNVAMSHGNKEVFSCRGILLAVNWFLERGHTDITVFVPSWRKEQPRPDVPITDQHILRELEKKKILVFTPSRRVGGKRVVCYDDRFIVKLAYESDGIVVSNDTYRDLQGERQEWKRFIEERLLMYSFVNDKFMPPDDPLGRHGPSLDNFLRKKPLTLE

SEQ ID NO: 566 - protein, 847 aa, Artificial Sequence
  16PUF - frame 3 - entire construct
PKKKRKVGRSRLLEDFRNNRYPNLQLREIAGHIMEFSQDQHGNRFIQLKLERATPAERQLVFNEILQAAYQLMVDVFGSYVIRKFFEFGSLEQKLALAERIRGHVLSLALQMYGSRVIEKALEFIPSDQQNEMVRELDGHVLKCVKDQNGNHVVQKCIECVQPQSLQFIIDAFKGQVFALSTHPYGSRVIRRILEHCLPDQTLPILEELHQHTEQLVQDQYGSYVIEHVLEHGRPEDKSKIVAEIRGNVLVLSQHKFANNVVQKCVTHASRTERAVLIDEVCTMNDGPHSALYTMMKDQYASYVVRKMIDVAEPGQRKIVMHKIRPHIMEFSQDQHGSRFIELKLERATPAERQLVFNEILQAAYQLMVDVFGNYVIQKFFEFGSLEQKLALAERIRGHVLSLALQMYGSYVIRKALEFIPSDQQNEMVRELDGHVLKCVKDQNGSYVVEKCIECVQPQSLQFIIDAFKGQVFALSTHPYGNRVIQRILEHCLPDQTLPILEELHQHTEQLVQDQYGSYVIRHVLEHGRPEDKSKIVAEIRGNVLVLSQHKFASNVVEKCVTHASRTERAVLIDEVCTMNDGPHSALYTMMKDQYANYVVQKMIDVAEPGQRKIVMHKIRPHIATLRKYTYGKHILAKLEKYYMKNGVDLGVDTANGSGGGTPKAPNLEPPLPEEEKEGSDLRPVVIDGSNVAMSHGNKEVFSCRGILLAVNWFLERGHTDITVFVPSWRKEQPRPDVPITDQHILRELEKKKILVFTPSRRVGGKRVVCYDDRFIVKLAYESDGIVVSNDTYRDLQGERQEWKRFIEERLLMYSFVNDKFMPPDDPLGRHGPSLDNFLRKKPLTLE

SEQ ID NO: 567 - protein, 811 aa, Artificial Sequence
  15PUF - frame 3 - entire construct
PKKKRKVGRSRLLEDFRNNRYPNLQLREIAGHIMEFSQDQHGSRFIRLKLERATPAERQLVFNEILQAAYQLMVDVFGSYVIEKFFEFGSLEQKLALAERIRGHVLSLALQMYGNRVIQKALEFIPSDQQNEMVRELDGHVLKCVKDQNGSYVVRKCIECVQPQSLQFIIDAFKGQVFALSTHPYGSRVIERILEHCLPDQTLPILEELHQHTEQLVQDQYGNYVIQHVLEHGRPEDKSKIVAEIRGNVLVLSQHKFASYVVRKCVTHASRTERAVLIDEVCTMNDGPHSHIMEFSQDQHGSRFIELKLERATPAERQLVFNEILQAAYQLMVDVFGNYVIQKFFEFGSLEQKLALAERIRGHVLSLALQMYGSYVIRKALEFIPSDQQNEMVRELDGHVLKCVKDQNGSYVVEKCIECVQPQSLQFIIDAFKGQVFALSTHPYGNRVIQRILEHCLPDQTLPILEELHQHTEQLVQDQYGSYVIRHVLEHGRPEDKSKIVAEIRGNVLVLSQHKFASNVVEKCVTHASRTERAVLIDEVCTMNDGPHSALYTMMKDQYANYVVQKMIDVAEPGQRKIVMHKIRPHIATLRKYTYGKHILAKLEKYYMKNGVDLGVDTANGSGGGTPKAPNLEPPLPEEEKEGSDLRPVVIDGSNVAMSHGNKEVFSCRGILLAVNWFLERGHTDITVFVPSWRKEQPRPDVPITDQHILRELEKKKILVFTPSRRVGGKRVVCYDDRFIVKLAYESDGIVVSNDTYRDLQGERQEWKRFIEERLLMYSFVNDKFMPPDDPLGRHGPSLDNFLRKKPLTLE

SEQ ID NO: 568 - DNA, 1060 bp, Artificial Sequence
  Human desmin promoter full
taccccctgccccccacagctcctctcctgtgccttgtttcccagccatgcgttctcctctataaatacccgctctggtatttggggttggcagctgttgctgccagggagatggttgggttgacatgcggctcctgacaaaacacaaacccctggtgtgtgtgggcgtgggtggtgtgagtagggggatgaatcagggagggggcaggggacccagggggcaggagccacacaaagtctgtgcgggggtgggagcgcacatagcaattggaaactgaaagcttatcagaccctttctggaaatcagcccactgtttataaacttgaggccccaccctcgacagtaccggggaggaagagggcctgcactagtccagagggaaactgaggctcagggccagctcgcccatagacatacatggcaggcaggctttggccaggatccctccgcctgccaggcgtctccctgccctcccttcctgcctagagacccccaccctcaagcctggctggtctttgcctgagacccaaacctcttcgacttcaagagaatatttaggaacaaggtggtttagggcctttcctgggaacaggccttgaccctttaagaaatgacccaaagtctctccttgaccaaaaaggggaccctcaaactaaagggaagcctctcttctgctgtctcccctgaccccactcccccccaccccaggacgaggagataaccagggctgaaagaggcccgcctgggggctgcagacatgcttgctgcctgccctggcgaaggattggcaggcttgcccgtcacaggacccccgctggctgactcaggggcgcaggccttttgcgggggagctggcctccccgcccccacggccacgggccgccctttcctggcaggacagcgggatcttgcagctgtcaggggaggggaggcgggggctgatgtcaggagggatacaaatagtgccgacggctgggggccctgtctcccctcgccgcatccactctccggccggccgcctgcccgccgcctcctccgtgcgcccgccagcctcgcccg

SEQ ID NO: 569 - DNA, 708 bp, Artificial Sequence
  human desmin promoter truncated
acccatgcctcctcaggtaccccctgccccccacagctcctctcctgtgccttgtttcccagccatgcgttctcctctataaatacccgctctggtatttggggttggcagctgttgctgccagggagatggttgggttgacatgcggctcctgacaaaacacaaacccctggtgtgtgtgggcgtgggtggtgtgagtagggggatgaatcagggagggggcaggggacccagggggcaggagccacacaaagtctgtgcgggggtgggagcgcacatagcaattggaaactgaaagcttatcagaccctttctggaaatcagcccactgtttataaacttgaggccccaccctcgagataaccagggctgaaagaggcccgcctgggggctgcagacatgcttgctgcctgccctggcgaaggattggcaggcttgcccgtcacaggacccccgctggctgactcaggggcgcaggccttttgcgggggagctggcctccccgcccccacggccacgggccgccctttcctggcaggacagcgggatcttgcagctgtcaggggaggggaggcgggggctgatgtcaggagggatataaatagtgccgacggctgggggccctgtctcccctcgccgcatccactctccggccggccgcctgcccgccgcctcctccgtgcgcccgccagcctcgcccgcgccgtc

SEQ ID NO: 570 - protein, 349 aa, Artificial Sequence; identical to SEQ ID NO: 444
  8PUF

SEQ ID NO: 571 - protein, 7 aa, Artificial Sequence
  SV-40 NLS
PKKKRKV

SEQ ID NO: 572 - protein, 1019 aa, Artificial Sequence
  Cas13d Seq212
KKKHQSAAEKRQVKKLKNQEKAQKYASEPSPLQSDTAGVECSQKKTVVSHIASSKTLAKAMGLKSTLVMGDKLVITSFAASKAVGGAGYKSANIEKITDLQGRVIEEHERMFSADVGEKNIELSKNDCHTNVNNPVVTNIGKDYIGLKSRLEQEFFGKTFENDNLHVQLAYNILDIKKILGTYVNNIIYIFYNLNRAGTGRDERMYDDLIGTLYAYKPMEAQQTYLLKGDKDMRRFEEVKQLLQNTSAYYVYYGTLFEKVKAKSKKEQRAKEAEIDACTAHNYDVLRLLSLMRQLCMHSVAGTAFKLAESALFNIEDVLSADLKEILDEAFSGAVNKLNDGFVQHSGNNLYVLQQLYPNETIERIAEKYYRLTVRKEDLNMGVNIKKLRELIVGQYFPEVLDKEYDLSKNGDSVVTYRSKIYTVMNYILLYYLEDHDSSRESMVEALRQNREGDEGKEEIYRQFAKKVWNGVSGLFGVCLNLFKTEKRNKFRSKVALPDVSGAAYMLSSENIDYFVKMLFFVCKFLDGKEINELLCALINKFDNIADILDAAAQCGSSVWFVDSYRFFERSRRISAQIRIVKNIASKDFKKSKKDSDESYPEQLYLDALALLGDVISKYKQNRDGSVVIDDQGNAVLTEQYKRFRYEFFEEIKRDESGGIKYKKSGKPEYNHQRRNFILNNVLKSKWFFYVVKYNRPSSCRELMKNKEILRFVLRDIPDSQVRRYFKAVQGEEAYASAEAMRTRLVDALSQFSVTACLDEVGGMTDKEFASQRAVDSKEKLRAIIRLYLTVAYLITKSMVKVNTRFSIAFSVLERDYYLLIDGKKKSSDYTGEDMLALTRKFVGEDAGLYREWKEKNAEAKDKYFDKAERKKVLRQNDKMIRKMHFTPHSLNYVQKNLESVQSNGLAAVIKEYRNAVAHLNIINRLDEYIGSARADSYYSLYCYCLQMYLSKNFSVGYLINVQKQLEEHHTYMKDLMWLLNIPFAYNLARYKNLSNEKLFYDEEAAAEKADKAENERGE

SEQ ID NO: 573 - DNA, 4561 bp, Artificial Sequence
  active Cas13d AAV vector
gagggcctatttcccatgattccttcatatttgcatatacgatacaaggctgttagagagataattagaattaatttgactgtaaacacaaagatattagtacaaaatacgtgacgtagaaagtaataatttcttgggtagtttgcagttttaaaattatgttttaaaatggactatcatatgcttaccgtaacttgaaagtatttcgatttcttggctttatatatcttgtggaaaggacgaaacaccgtacaatagccctgcagtaaggcagggttctaagaccagcagcagcagcagcagcagcagcattttttccaccacactggactagtggatctctgcagccctccttaggacccatgcctcctcaggtaccccctgccccccacagctcctctcctgtgccttgtttcccagccatgcgttctcctctataaatacccgctctggtatttggggttggcagctgttgctgccagggagatggttgggttgacatgcggctcctgacaaaacacaaacccctggtgtgtgtgggcgtgggtggtgtgagtagggggatgaatcagggagggggcaggggacccagggggcaggagccacacaaagtctgtgcgggggtgggagcgcacatagcaattggaaactgaaagcttatcagaccctttctggaaatcagcccactgtttataaacttgaggccccaccctcgagataaccagggctgaaagaggcccgcctgggggctgcagacatgcttgctgcctgccctggcgaaggattggcaggcttgcccgtcacaggacccccgctggctgactcaggggcgcaggccttttgcgggggagctggcctccccgcccccacggccacgggccgccctttcctggcaggacagcgggatcttgcagctgtcaggggaggggaggcgggggctgatgtcaggagggatataaatagtgccgacggctgggggccctgtctcccctcgccgcatccactctccggccggccgcctgcccgccgcctcctccgtgcgcccgccagcctcgcccgcgccgtcacgcgtgccgccaccatgaagaagaagcaccagagcgccgccgagaagaggcaagtgaagaagctcaagaatcaagagaaggcccagaagtacgctagcgagccttcccccctccagagcgatacagctggcgtggaatgctcccagaaaaagacagtcgtcagccacattgccagctccaagacactggccaaggctatgggactcaaatccacactggtcatgggcgacaagctggtcatcaccagctttgctgctagcaaggctgtcggaggcgctggctacaaaagcgctaacattgaaaaaatcacagatctgcaaggaagggtcattgaggagcacgaaaggatgtttagcgccgatgtcggagagaaaaatatcgaactgagcaagaatgactgccacaccaacgtcaacaaccccgtggtgaccaacatcggaaaggattacatcggactgaaatctaggctggagcaagagtttttcggcaagacattcgagaatgacaatctgcatgtgcagctggcctacaatatcctcgacatcaagaaaattctgggaacctatgtgaacaatatcatttatatcttctacaatctgaatagggctggcaccggcagagatgagaggatgtatgacgacctcatcggcacactgtacgcttacaaacccatggaggctcaacagacctatctgctcaaaggcgacaaggatatgaggaggtttgaggaggtgaaacagctgctgcaaaacacctccgcttactatgtgtattacggcacactgttcgagaaggtgaaggctaagagcaagaaggaacagagggctaaggaggccgaaatcgacgcttgtaccgcccataactacgatgtgctgagactgctgtccctcatgaggcagctgtgcatgcactccgtcgctggaacagcctttaagctggctgagtccgctctgttcaacattgaggatgtgctcagcgccgatctgaaggaaatcctcgatgaagccttctccggcgccgtgaacaagctcaatgacggattcgtgcagcactccggcaacaatctgtacgtgctccagcagctgtaccctaatgagaccatcgagagaatcgccgagaagtactacagactcaccgtgaggaaggaggatctgaacatgggagtcaacattaaaaagctgagggagctgatcgtgggccaatactttcccgaggtcctcgacaaagaatacgacctctccaagaatggagacagcgtggtgacatacagaagcaagatttataccgtgatgaattacattctgctgtattacctcgaggaccacgactccagcagagaaagcatggtcgaagctctgagacaaaacagagagggcgatgaaggcaaggaggagatctatagacagtttgccaagaaggtgtggaacggcgtgtccggactgtttggcgtgtgtctgaacctcttcaagaccgaaaagagaaacaagtttaggagcaaagtcgccctccccgatgtgtccggcgctgcctatatgctctcctccgagaacatcgactactttgtcaagatgctcttctttgtgtgtaagtttctggatggcaaagaaatcaacgagctgctgtgcgctctgatcaacaaatttgataatattgccgatattctggatgctgccgctcaatgtggctcctccgtctggttcgtggacagctataggttcttcgagagatctaggaggattagcgcccagattagaatcgtgaagaacatcgcttccaaggattttaagaaatccaagaaggattccgatgagagctaccccgagcagctgtatctggatgctctggctctgctcggagacgtcatctccaagtacaagcagaatagagatggcagcgtcgtcatcgatgaccaaggcaatgccgtgctgacagagcaatacaagaggtttagatatgaatttttcgaggagatcaagagggacgaaagcggcggcatcaagtacaagaagtccggaaaacccgagtacaaccatcagagaaggaattttattctgaataatgtgctgaaaagcaaatggtttttctatgtggtgaagtacaataggcccagcagctgcagagaactgatgaagaataaggaaattctgaggttcgtgctgagagacatccccgactcccaagtgagaagatactttaaggccgtccaaggagaggaagcttacgctagcgccgaagctatgaggacaagactggtcgacgctctgtcccaatttagcgtcacagcttgtctggatgaagtgggcggcatgacagacaaggaattcgcctcccagagggccgtcgatagcaaagaaaaactgagagccatcatcagactgtatctgacagtcgcctatctgattaccaagagcatggtgaaggtgaatacaaggtttagcattgcctttagcgtgctggagagggactactatctgctcattgacggcaagaagaaatccagcgactacaccggagaggatatgctggctctgaccagaaaatttgtgggcgaagatgctggactgtatagagagtggaaagagaagaacgctgaagccaaggacaaatattttgacaaggccgaaaggaagaaggtgctgagacagaacgataagatgatcagaaagatgcacttcacaccccactccctcaattacgtccaaaagaatctcgaaagcgtccagagcaacggactggccgccgtcatcaaggaatatagaaatgccgtcgctcacctcaatatcatcaatagactggacgagtacattggctccgctagggctgatagctactactctctgtactgttactgcctccaaatgtatctgagcaagaacttcagcgtgggctacctcatcaacgtgcaaaagcagctggaggagcaccacacctacatgaaggatctcatgtggctgctcaacatccccttcgcttacaacctcgccagatacaaaaatctgtccaacgaaaaactcttttacgacgaggaagccgccgccgaaaaggctgacaaggctgagaacgagagaggcgaaggaagccccaagaagaaaaggaaggtctaaatccgatccaccggatctagagataatcaacctctggattacaaaatttgtgaaagattgactggtattcttaactatgttgctccttttacgctatgtggatacgctgctttaatgcctttgtatcatgctattgcttcccgtatggctttcattttctcctccttgtataaatcctggttagttcttgccacggcggaactcatcgccgcctgccttgcccgctgctggacaggggctcggctgttgggcactgacaattccgtggaacttgtttattgcagcttataatggttacaaataaagcaatagcatcacaaatttcacaaataaagcatttttttcactgcattctagttgtggtttgtccaaactcatcaatgtatctta

SEQ ID NO: 574 - DNA, 1707 bp, Artificial Sequence
  A02205 vector
gaccgtgtgctcaaaagaagtgctgaaggaagcaaccctcctaaaccactgaaaaaactacgcggaggatcgggacgaagccgactcttggaagacttcagaaacaatcggtatccgaaccttcagctgagagaaattgctggtcacatcatggaattttctcaagatcaacatggaagccggtttattgaacttaaactcgaacgagccaccccggccgaaaggcaattggtgttcaatgaaattcttcaggccgcataccaactcatggttgatgtttttgggaactatgttattcaaaagttttttgagttcgggtcactggagcaaaagttggcattggcagagcgaatccggggccatgttctgagcctcgctctccaaatgtacggtagttatgtcattcgcaaagcactcgagttcataccatcagatcaacagaatgagatggtgcgggagctggatgggcatgttttgaaatgcgtgaaagaccaaaacggtagctacgtagttgagaaatgcatcgaatgcgtccaaccacagtctctccaatttattatagatgcatttaagggtcaggttttcgcgctttctacgcacccgtatgggaaccgagtgattcagagaatcttggagcactgcctgccggatcagacactccctatcttggaggaattgcaccagcataccgaacaattggtgcaagatcaatacggttcatatgttattcggcacgttcttgagcatggaaggccagaggacaagtcaaagatcgtcgctgagattagaggtaacgtattggtgctctcacaacacaaatttgcatctaatgtggtggagaaatgtgttactcatgcttctagaacggaaagggcagttctcatagacgaagtttgcacaatgaatgatggtcctcatagcgcactttataccatgatgaaggaccagtatgcaaactatgtcgtccagaaaatgatcgatgtggcggagcccggtcaacggaaaatcgtgatgcacaaaatccgacctcacattgctacactcagaaaatacacgtatggaaaacatattctggctaagctggagaaatattacatgaagaatggagtggatctgggggtggatactgccaatggcagcggtggtggcacccctaaggctcccaacctggagcctccactcccagaagaggaaaaggagggcagcgacctgagaccagtggtcatcgatgggagcaacgtggccatgagccatgggaacaaggaggtcttctcctgccggggcatcctgctggcagtgaactggtttctggagcggggccacacagacatcacagtgtttgtgccatcctggaggaaggagcagcctcggcccgacgtgcccatcacagaccagcacatcctgcgggaactggagaagaagaagatcctggtgttcacaccatcacgacgcgtgggtggcaagcgggtggtgtgctatgacgacagattcattgtgaagctggcctacgagtctgacgggatcgtggtttccaacgacacataccgtgacctccaaggcgagcggcaggagtggaagcgcttcatcgaggagcggctgctcatgtactccttcgtcaatgacaagtttatgccccctgatgacccactgggccggcacgggcccagcctggacaacttcctgcgtaagaagccactcactttggag

SEQ ID NO: 575 - DNA, 4063 bp, Artificial Sequence
  A02205 vector with ITRs
cctgcaggcagctgcgcgctcgctcgctcactgaggccgcccgggcgtcgggcgacctttggtcgcccggcctcagtgagcgagcgagcgcgcagagagggagtggccaactccatcactaggggttcctgcggccggtcgcgtctagtactagttaccccctgccccccacagctcctctcctgtgccttgtttcccagccatgcgttctcctctataaatacccgctctggtatttggggttggcagctgttgctgccagggagatggttgggttgacatgcggctcctgacaaaacacaaacccctggtgtgtgtgggcgtgggtggtgtgagtagggggatgaatcagggagggggcaggggacccagggggcaggagccacacaaagtctgtgcgggggtgggagcgcacatagcaattggaaactgaaagcttatcagaccctttctggaaatcagcccactgtttataaacttgaggccccaccctcgacagtaccggggaggaagagggcctgcactagtccagagggaaactgaggctcagggccagctcgcccatagacatacatggcaggcaggctttggccaggatccctccgcctgccaggcgtctccctgccctcccttcctgcctagagacccccaccctcaagcctggctggtctttgcctgagacccaaacctcttcgacttcaagagaatatttaggaacaaggtggtttagggcctttcctgggaacaggccttgaccctttaagaaatgacccaaagtctctccttgaccaaaaaggggaccctcaaactaaagggaagcctctcttctgctgtctcccctgaccccactcccccccaccccaggacgaggagataaccagggctgaaagaggcccgcctgggggctgcagacatgcttgctgcctgccctggcgaaggattggcaggcttgcccgtcacaggacccccgctggctgactcaggggcgcaggccttttgcgggggagctggcctccccgcccccacggccacgggccgccctttcctggcaggacagcgggatcttgcagctgtcaggggaggggaggcgggggctgatgtcaggagggatacaaatagtgccgacggctgggggccctgtctcccctcgccgcatccactctccggccggccgcctgcccgccgcctcctccgtgcgcccgccagcctcgcccggctagcgccgccaccatggaccgtgtgctcaaaagaagtgctgaaggaagcaaccctcctaaaccactgaaaaaactacgcggaggatcgggacgaagccgactcttggaagacttcagaaacaatcggtatccgaaccttcagctgagagaaattgctggtcacatcatggaattttctcaagatcaacatggaagccggtttattgaacttaaactcgaacgagccaccccggccgaaaggcaattggtgttcaatgaaattcttcaggccgcataccaactcatggttgatgtttttgggaactatgttattcaaaagttttttgagttcgggtcactggagcaaaagttggcattggcagagcgaatccggggccatgttctgagcctcgctctccaaatgtacggtagttatgtcattcgcaaagcactcgagttcataccatcagatcaacagaatgagatggtgcgggagctggatgggcatgttttgaaatgcgtgaaagaccaaaacggtagctacgtagttgagaaatgcatcgaatgcgtccaaccacagtctctccaatttattatagatgcatttaagggtcaggttttcgcgctttctacgcacccgtatgggaaccgagtgattcagagaatcttggagcactgcctgccggatcagacactccctatcttggaggaattgcaccagcataccgaacaattggtgcaagatcaatacggttcatatgttattcggcacgttcttgagcatggaaggccagaggacaagtcaaagatcgtcgctgagattagaggtaacgtattggtgctctcacaacacaaatttgcatctaatgtggtggagaaatgtgttactcatgcttctagaacggaaagggcagttctcatagacgaagtttgcacaatgaatgatggtcctcatagcgcactttataccatgatgaaggaccagtatgcaaactatgtcgtccagaaaatgatcgatgtggcggagcccggtcaacggaaaatcgtgatgcacaaaatccgacctcacattgctacactcagaaaatacacgtatggaaaacatattctggctaagctggagaaatattacatgaagaatggagtggatctgggggtggatactgccaatggcagcggtggtggcacccctaaggctcccaacctggagcctccactcccagaagaggaaaaggagggcagcgacctgagaccagtggtcatcgatgggagcaacgtggccatgagccatgggaacaaggaggtcttctcctgccggggcatcctgctggcagtgaactggtttctggagcggggccacacagacatcacagtgtttgtgccatcctggaggaaggagcagcctcggcccgacgtgcccatcacagaccagcacatcctgcgggaactggagaagaagaagatcctggtgttcacaccatcacgacgcgtgggtggcaagcgggtggtgtgctatgacgacagattcattgtgaagctggcctacgagtctgacgggatcgtggtttccaacgacacataccgtgacctccaaggcgagcggcaggagtggaagcgcttcatcgaggagcggctgctcatgtactccttcgtcaatgacaagtttatgccccctgatgacccactgggccggcacgggcccagcctggacaacttcctgcgtaagaagccactcactttggagtaatcgcggccgctcgaggattataaggatgacgacgataaattcgtcgagcaccaccaccaccaccactaataaggtttatccgatccaccggatctagataagatatccgatccaccggatctagataactgatcataatcagccataccacatttgtagaggttttacttgctttaaaaaacctcccacacctccccctgaacctgaaacataaaatgaatgcaattgttgttgttaatcaacctctggattacaaaatttgtgaaagattgactggtattcttaactatgttgctccttttacgctatgtggatacgctgctttaatgcctttgtatcatgctattgcttcccgtatggctttcattttctcctccttgtataaatcctggttgctgtctctttatgaggagttgtggcccgttgtcaggcaacgtggcgtggtgtgcactgtgtttgctgacgcaacccccactggttggggcattgccaccacctgtcagctcctttccgggactttcgctttccccctccctattgccacggcggaactcatcgccgcctgccttgcccgctgctggacaggggctcggctgttgggcactgacaattccgtggtgttgtcggggaaatcatcgtcctttccttggctgctcgcctgtgttgccacctggattctgcgcgggacgtccttctgctacgtcccttcggccctcaatccagcggaccttccttcccgcggcctgctgccggctctgcggcctcttccgcgtcttcgccttcgccctcagacgagtcggatctccctttgggccgcctccccgcaacttgtttattgcagcttataatggttacaaataaagcaatagcatcacaaatttcacaaataaagcatttttttcactgcattctagttgtggtttgtccaaactcatcaatgtatcttaacgcggtaaccacgtgcggacccaacggccgcaggaacccctagtgatggagttggccactccctctctgcgcgctcgctcgctcactgaggccgggcgaccaaaggtcgcccgacgcccgggctttgcccgggcggcctcagtgagcgagcgagcgcgcagctgcctgcagg

SEQ ID NO: 576 - DNA, 1119 bp, Artificial Sequence
  A02239 PUF vector
gaccgtgtgctcaaaagaagtgctgaaggaagcaaccctcctaaaccactgaaaaaactacgcggaggatcgggacgaagccgactcttggaagacttcagaaacaatcggtatccgaaccttcagctgagagaaattgctggtcacatcatggaattttctcaagatcaacatggaagccggtttattgaacttaaactcgaacgagccaccccggccgaaaggcaattggtgttcaatgaaattcttcaggccgcataccaactcatggttgatgtttttgggaactatgttattcaaaagttttttgagttcgggtcactggagcaaaagttggcattggcagagcgaatccggggccatgttctgagcctcgctctccaaatgtacggtagttatgtcattcgcaaagcactcgagttcataccatcagatcaacagaatgagatggtgcgggagctggatgggcatgttttgaaatgcgtgaaagaccaaaacggtagctacgtagttgagaaatgcatcgaatgcgtccaaccacagtctctccaatttattatagatgcatttaagggtcaggttttcgcgctttctacgcacccgtatgggaaccgagtgattcagagaatcttggagcactgcctgccggatcagacactccctatcttggaggaattgcaccagcataccgaacaattggtgcaagatcaatacggttcatatgttattcggcacgttcttgagcatggaaggccagaggacaagtcaaagatcgtcgctgagattagaggtaacgtattggtgctctcacaacacaaatttgcatctaatgtggtggagaaatgtgttactcatgcttctagaacggaaagggcagttctcatagacgaagtttgcacaatgaatgatggtcctcatagcgcactttataccatgatgaaggaccagtatgcaaactatgtcgtccagaaaatgatcgatgtggcggagcccggtcaacggaaaatcgtgatgcacaaaatccgacctcacattgctacactcagaaaatacacgtatggaaaacatattctggctaagctggagaaatattacatgaagaatggagtggatctgggg

SEQ ID NO: 577 - DNA, 3475 bp, Artificial Sequence
  A02239 PUF vector with ITRS
cctgcaggcagctgcgcgctcgctcgctcactgaggccgcccgggcgtcgggcgacctttggtcgcccggcctcagtgagcgagcgagcgcgcagagagggagtggccaactccatcactaggggttcctgcggccggtcgcgtctagtactagttaccccctgccccccacagctcctctcctgtgccttgtttcccagccatgcgttctcctctataaatacccgctctggtatttggggttggcagctgttgctgccagggagatggttgggttgacatgcggctcctgacaaaacacaaacccctggtgtgtgtgggcgtgggtggtgtgagtagggggatgaatcagggagggggcaggggacccagggggcaggagccacacaaagtctgtgcgggggtgggagcgcacatagcaattggaaactgaaagcttatcagaccctttctggaaatcagcccactgtttataaacttgaggccccaccctcgacagtaccggggaggaagagggcctgcactagtccagagggaaactgaggctcagggccagctcgcccatagacatacatggcaggcaggctttggccaggatccctccgcctgccaggcgtctccctgccctcccttcctgcctagagacccccaccctcaagcctggctggtctttgcctgagacccaaacctcttcgacttcaagagaatatttaggaacaaggtggtttagggcctttcctgggaacaggccttgaccctttaagaaatgacccaaagtctctccttgaccaaaaaggggaccctcaaactaaagggaagcctctcttctgctgtctcccctgaccccactcccccccaccccaggacgaggagataaccagggctgaaagaggcccgcctgggggctgcagacatgcttgctgcctgccctggcgaaggattggcaggcttgcccgtcacaggacccccgctggctgactcaggggcgcaggccttttgcgggggagctggcctccccgcccccacggccacgggccgccctttcctggcaggacagcgggatcttgcagctgtcaggggaggggaggcgggggctgatgtcaggagggatacaaatagtgccgacggctgggggccctgtctcccctcgccgcatccactctccggccggccgcctgcccgccgcctcctccgtgcgcccgccagcctcgcccggctagcgccgccaccatggaccgtgtgctcaaaagaagtgctgaaggaagcaaccctcctaaaccactgaaaaaactacgcggaggatcgggacgaagccgactcttggaagacttcagaaacaatcggtatccgaaccttcagctgagagaaattgctggtcacatcatggaattttctcaagatcaacatggaagccggtttattgaacttaaactcgaacgagccaccccggccgaaaggcaattggtgttcaatgaaattcttcaggccgcataccaactcatggttgatgtttttgggaactatgttattcaaaagttttttgagttcgggtcactggagcaaaagttggcattggcagagcgaatccggggccatgttctgagcctcgctctccaaatgtacggtagttatgtcattcgcaaagcactcgagttcataccatcagatcaacagaatgagatggtgcgggagctggatgggcatgttttgaaatgcgtgaaagaccaaaacggtagctacgtagttgagaaatgcatcgaatgcgtccaaccacagtctctccaatttattatagatgcatttaagggtcaggttttcgcgctttctacgcacccgtatgggaaccgagtgattcagagaatcttggagcactgcctgccggatcagacactccctatcttggaggaattgcaccagcataccgaacaattggtgcaagatcaatacggttcatatgttattcggcacgttcttgagcatggaaggccagaggacaagtcaaagatcgtcgctgagattagaggtaacgtattggtgctctcacaacacaaatttgcatctaatgtggtggagaaatgtgttactcatgcttctagaacggaaagggcagttctcatagacgaagtttgcacaatgaatgatggtcctcatagcgcactttataccatgatgaaggaccagtatgcaaactatgtcgtccagaaaatgatcgatgtggcggagcccggtcaacggaaaatcgtgatgcacaaaatccgacctcacattgctacactcagaaaatacacgtatggaaaacatattctggctaagctggagaaatattacatgaagaatggagtggatctggggtaatcgcggccgctcgaggattataaggatgacgacgataaattcgtcgagcaccaccaccaccaccactaataaggtttatccgatccaccggatctagataagatatccgatccaccggatctagataactgatcataatcagccataccacatttgtagaggttttacttgctttaaaaaacctcccacacctccccctgaacctgaaacataaaatgaatgcaattgttgttgttaatcaacctctggattacaaaatttgtgaaagattgactggtattcttaactatgttgctccttttacgctatgtggatacgctgctttaatgcctttgtatcatgctattgcttcccgtatggctttcattttctcctccttgtataaatcctggttgctgtctctttatgaggagttgtggcccgttgtcaggcaacgtggcgtggtgtgcactgtgtttgctgacgcaacccccactggttggggcattgccaccacctgtcagctcctttccgggactttcgctttccccctccctattgccacggcggaactcatcgccgcctgccttgcccgctgctggacaggggctcggctgttgggcactgacaattccgtggtgttgtcggggaaatcatcgtcctttccttggctgctcgcctgtgttgccacctggattctgcgcgggacgtccttctgctacgtcccttcggccctcaatccagcggaccttccttcccgcggcctgctgccggctctgcggcctcttccgcgtcttcgccttcgccctcagacgagtcggatctccctttgggccgcctccccgcaacttgtttattgcagcttataatggttacaaataaagcaatagcatcacaaatttcacaaataaagcatttttttcactgcattctagttgtggtttgtccaaactcatcaatgtatcttaacgcggtaaccacgtgcggacccaacggccgcaggaacccctagtgatggagttggccactccctctctgcgcgctcgctcgctcactgaggccgggcgaccaaaggtcgcccgacgcccgggctttgcccgggcggcctcagtgagcgagcgagcgcgcagctgcctgcagg

SEQ ID NO: 578 - DNA, 1119 bp, Artificial Sequence; identical to SEQ ID NO: 576
  blocking 8 PUF vector

SEQ ID NO: 579 - DNA, 2814 bp, Artificial Sequence
  blocking 8 PUF vector with ITRs
cctgcaggcagctgcgcgctcgctcgctcactgaggccgcccgggcgtcgggcgacctttggtcgcccggcctcagtgagcgagcgagcgcgcagagagggagtggccaactccatcactaggggttcctgcggccggtcgcgtctagttattaatgcatactagtaattggctccggtgcccgtcagtgggcagagcgcacatcgcccacagtccccgagaagttggggggaggggtcggcaattgaaccggtgcctagagaaggtggcgcggggtaaactgggaaagtgatgtcgtgtactggctccgcctttttcccgagggtgggggagaaccgtatataagtgcagtagtcgccgtgaacgttctttttcgcaacgggtttgccgccagaacacagaattccaggtaagtcccgcagccgtaacgaccttgggggggtgtgagattctcattctaattttgaagaatattaggtgtaaaagcaagaaatacaatgatcctgaggtgacacgcttatgttttacttttaaactaggtgaattcaagatctgctagcgccgccaccatggaccgtgtgctcaaaagaagtgctgaaggaagcaaccctcctaaaccactgaaaaaactacgcggaggatcgggacgaagccgactcttggaagacttcagaaacaatcggtatccgaaccttcagctgagagaaattgctggtcacatcatggaattttctcaagatcaacatggaagccggtttattgaacttaaactcgaacgagccaccccggccgaaaggcaattggtgttcaatgaaattcttcaggccgcataccaactcatggttgatgtttttgggaactatgttattcaaaagttttttgagttcgggtcactggagcaaaagttggcattggcagagcgaatccggggccatgttctgagcctcgctctccaaatgtacggtagttatgtcattcgcaaagcactcgagttcataccatcagatcaacagaatgagatggtgcgggagctggatgggcatgttttgaaatgcgtgaaagaccaaaacggtagctacgtagttgagaaatgcatcgaatgcgtccaaccacagtctctccaatttattatagatgcatttaagggtcaggttttcgcgctttctacgcacccgtatgggaaccgagtgattcagagaatcttggagcactgcctgccggatcagacactccctatcttggaggaattgcaccagcataccgaacaattggtgcaagatcaatacggttcatatgttattcggcacgttcttgagcatggaaggccagaggacaagtcaaagatcgtcgctgagattagaggtaacgtattggtgctctcacaacacaaatttgcatctaatgtggtggagaaatgtgttactcatgcttctagaacggaaagggcagttctcatagacgaagtttgcacaatgaatgatggtcctcatagcgcactttataccatgatgaaggaccagtatgcaaactatgtcgtccagaaaatgatcgatgtggcggagcccggtcaacggaaaatcgtgatgcacaaaatccgacctcacattgctacactcagaaaatacacgtatggaaaacatattctggctaagctggagaaatattacatgaagaatggagtggatctggggtaatcgcggccgctcgaggattataaggatgacgacgataaattcgtcgagcaccaccaccaccaccactaataaggtttatccgatccaccggatctagataagatatccgatccaccggatctagataactgatcataatcagccataccacatttgtagaggttttacttgctttaaaaaacctcccacacctccccctgaacctgaaacataaaatgaatgcaattgttgttgttaatcaacctctggattacaaaatttgtgaaagattgactggtattcttaactatgttgctccttttacgctatgtggatacgctgctttaatgcctttgtatcatgctattgcttcccgtatggctttcattttctcctccttgtataaatcctggttgctgtctctttatgaggagttgtggcccgttgtcaggcaacgtggcgtggtgtgcactgtgtttgctgacgcaacccccactggttggggcattgccaccacctgtcagctcctttccgggactttcgctttccccctccctattgccacggcggaactcatcgccgcctgccttgcccgctgctggacaggggctcggctgttgggcactgacaattccgtggtgttgtcggggaaatcatcgtcctttccttggctgctcgcctgtgttgccacctggattctgcgcgggacgtccttctgctacgtcccttcggccctcaatccagcggaccttccttcccgcggcctgctgccggctctgcggcctcttccgcgtcttcgccttcgccctcagacgagtcggatctccctttgggccgcctccccgcaacttgtttattgcagcttataatggttacaaataaagcaatagcatcacaaatttcacaaataaagcatttttttcactgcattctagttgtggtttgtccaaactcatcaatgtatcttaacgcggtaaccacgtgcggacccaacggccgcaggaacccctagtgatggagttggccactccctctctgcgcgctcgctcgctcactgaggccgggcgaccaaaggtcgcccgacgcccgggctttgcccgggcggcctcagtgagcgagcgagcgcgcagctgcctgcagg

SEQ ID NO: 580 - DNA, 4890 bp, Artificial Sequence
  active Cas13d AAV vector with ITRS
cctgcaggcagctgcgcgctcgctcgctcactgaggccgcccgggcgtcgggcgacctttggtcgcccggcctcagtgagcgagcgagcgcgcagagagggagtggccaactccatcactaggggttcctgcggccggtcgcgtctagtaaccggtgagggcctatttcccatgattccttcatatttgcatatacgatacaaggctgttagagagataattagaattaatttgactgtaaacacaaagatattagtacaaaatacgtgacgtagaaagtaataatttcttgggtagtttgcagttttaaaattatgttttaaaatggactatcatatgcttaccgtaacttgaaagtatttcgatttcttggctttatatatcttgtggaaaggacgaaacaccgtacaatagccctgcagtaaggcagggttctaagaccagcagcagcagcagcagcagcagcattttttccaccacactggactagtggatctctgcagccctccttaggacccatgcctcctcaggtaccccctgccccccacagctcctctcctgtgccttgtttcccagccatgcgttctcctctataaatacccgctctggtatttggggttggcagctgttgctgccagggagatggttgggttgacatgcggctcctgacaaaacacaaacccctggtgtgtgtgggcgtgggtggtgtgagtagggggatgaatcagggagggggcaggggacccagggggcaggagccacacaaagtctgtgcgggggtgggagcgcacatagcaattggaaactgaaagcttatcagaccctttctggaaatcagcccactgtttataaacttgaggccccaccctcgagataaccagggctgaaagaggcccgcctgggggctgcagacatgcttgctgcctgccctggcgaaggattggcaggcttgcccgtcacaggacccccgctggctgactcaggggcgcaggccttttgcgggggagctggcctccccgcccccacggccacgggccgccctttcctggcaggacagcgggatcttgcagctgtcaggggaggggaggcgggggctgatgtcaggagggatataaatagtgccgacggctgggggccctgtctcccctcgccgcatccactctccggccggccgcctgcccgccgcctcctccgtgcgcccgccagcctcgcccgcgccgtcacgcgtgccgccaccatgaagaagaagcaccagagcgccgccgagaagaggcaagtgaagaagctcaagaatcaagagaaggcccagaagtacgctagcgagccttcccccctccagagcgatacagctggcgtggaatgctcccagaaaaagacagtcgtcagccacattgccagctccaagacactggccaaggctatgggactcaaatccacactggtcatgggcgacaagctggtcatcaccagctttgctgctagcaaggctgtcggaggcgctggctacaaaagcgctaacattgaaaaaatcacagatctgcaaggaagggtcattgaggagcacgaaaggatgtttagcgccgatgtcggagagaaaaatatcgaactgagcaagaatgactgccacaccaacgtcaacaaccccgtggtgaccaacatcggaaaggattacatcggactgaaatctaggctggagcaagagtttttcggcaagacattcgagaatgacaatctgcatgtgcagctggcctacaatatcctcgacatcaagaaaattctgggaacctatgtgaacaatatcatttatatcttctacaatctgaatagggctggcaccggcagagatgagaggatgtatgacgacctcatcggcacactgtacgcttacaaacccatggaggctcaacagacctatctgctcaaaggcgacaaggatatgaggaggtttgaggaggtgaaacagctgctgcaaaacacctccgcttactatgtgtattacggcacactgttcgagaaggtgaaggctaagagcaagaaggaacagagggctaaggaggccgaaatcgacgcttgtaccgcccataactacgatgtgctgagactgctgtccctcatgaggcagctgtgcatgcactccgtcgctggaacagcctttaagctggctgagtccgctctgttcaacattgaggatgtgctcagcgccgatctgaaggaaatcctcgatgaagccttctccggcgccgtgaacaagctcaatgacggattcgtgcagcactccggcaacaatctgtacgtgctccagcagctgtaccctaatgagaccatcgagagaatcgccgagaagtactacagactcaccgtgaggaaggaggatctgaacatgggagtcaacattaaaaagctgagggagctgatcgtgggccaatactttcccgaggtcctcgacaaagaatacgacctctccaagaatggagacagcgtggtgacatacagaagcaagatttataccgtgatgaattacattctgctgtattacctcgaggaccacgactccagcagagaaagcatggtcgaagctctgagacaaaacagagagggcgatgaaggcaaggaggagatctatagacagtttgccaagaaggtgtggaacggcgtgtccggactgtttggcgtgtgtctgaacctcttcaagaccgaaaagagaaacaagtttaggagcaaagtcgccctccccgatgtgtccggcgctgcctatatgctctcctccgagaacatcgactactttgtcaagatgctcttctttgtgtgtaagtttctggatggcaaagaaatcaacgagctgctgtgcgctctgatcaacaaatttgataatattgccgatattctggatgctgccgctcaatgtggctcctccgtctggttcgtggacagctataggttcttcgagagatctaggaggattagcgcccagattagaatcgtgaagaacatcgcttccaaggattttaagaaatccaagaaggattccgatgagagctaccccgagcagctgtatctggatgctctggctctgctcggagacgtcatctccaagtacaagcagaatagagatggcagcgtcgtcatcgatgaccaaggcaatgccgtgctgacagagcaatacaagaggtttagatatgaatttttcgaggagatcaagagggacgaaagcggcggcatcaagtacaagaagtccggaaaacccgagtacaaccatcagagaaggaattttattctgaataatgtgctgaaaagcaaatggtttttctatgtggtgaagtacaataggcccagcagctgcagagaactgatgaagaataaggaaattctgaggttcgtgctgagagacatccccgactcccaagtgagaagatactttaaggccgtccaaggagaggaagcttacgctagcgccgaagctatgaggacaagactggtcgacgctctgtcccaatttagcgtcacagcttgtctggatgaagtgggcggcatgacagacaaggaattcgcctcccagagggccgtcgatagcaaagaaaaactgagagccatcatcagactgtatctgacagtcgcctatctgattaccaagagcatggtgaaggtgaatacaaggtttagcattgcctttagcgtgctggagagggactactatctgctcattgacggcaagaagaaatccagcgactacaccggagaggatatgctggctctgaccagaaaatttgtgggcgaagatgctggactgtatagagagtggaaagagaagaacgctgaagccaaggacaaatattttgacaaggccgaaaggaagaaggtgctgagacagaacgataagatgatcagaaagatgcacttcacaccccactccctcaattacgtccaaaagaatctcgaaagcgtccagagcaacggactggccgccgtcatcaaggaatatagaaatgccgtcgctcacctcaatatcatcaatagactggacgagtacattggctccgctagggctgatagctactactctctgtactgttactgcctccaaatgtatctgagcaagaacttcagcgtgggctacctcatcaacgtgcaaaagcagctggaggagcaccacacctacatgaaggatctcatgtggctgctcaacatccccttcgcttacaacctcgccagatacaaaaatctgtccaacgaaaaactcttttacgacgaggaagccgccgccgaaaaggctgacaaggctgagaacgagagaggcgaaggaagccccaagaagaaaaggaaggtctaaatccgatccaccggatctagagataatcaacctctggattacaaaatttgtgaaagattgactggtattcttaactatgttgctccttttacgctatgtggatacgctgctttaatgcctttgtatcatgctattgcttcccgtatggctttcattttctcctccttgtataaatcctggttagttcttgccacggcggaactcatcgccgcctgccttgcccgctgctggacaggggctcggctgttgggcactgacaattccgtggaacttgtttattgcagcttataatggttacaaataaagcaatagcatcacaaatttcacaaataaagcatttttttcactgcattctagttgtggtttgtccaaactcatcaatgtatcttaacgcggtaaccacgtgcggacccaacggccgcaggaacccctagtgatggagttggccactccctctctgcgcgctcgctcgctcactgaggccgggcgaccaaaggtcgcccgacgcccgggctttgcccgggcggcctcagtgagcgagcgagcgcgcagctgcctgcagg

SEQ ID NO: 581 - DNA, 1158 bp, Artificial Sequence
  blocking 8 PUF myc tag vector
gaccgtgtgctcaaaagaagtgctgaaggaagcaaccctcctaaaccactgaaaaaactacgcggaggatcgggacgaagccgactcttggaagacttcagaaacaatcggtatccgaaccttcagctgagagaaattgctggtcacatcatggaattttctcaagatcaacatggaagccggtttattgaacttaaactcgaacgagccaccccggccgaaaggcaattggtgttcaatgaaattcttcaggccgcataccaactcatggttgatgtttttgggaactatgttattcaaaagttttttgagttcgggtcactggagcaaaagttggcattggcagagcgaatccggggccatgttctgagcctcgctctccaaatgtacggtagttatgtcattcgcaaagcactcgagttcataccatcagatcaacagaatgagatggtgcgggagctggatgggcatgttttgaaatgcgtgaaagaccaaaacggtagctacgtagttgagaaatgcatcgaatgcgtccaaccacagtctctccaatttattatagatgcatttaagggtcaggttttcgcgctttctacgcacccgtatgggaaccgagtgattcagagaatcttggagcactgcctgccggatcagacactccctatcttggaggaattgcaccagcataccgaacaattggtgcaagatcaatacggttcatatgttattcggcacgttcttgagcatggaaggccagaggacaagtcaaagatcgtcgctgagattagaggtaacgtattggtgctctcacaacacaaatttgcatctaatgtggtggagaaatgtgttactcatgcttctagaacggaaagggcagttctcatagacgaagtttgcacaatgaatgatggtcctcatagcgcactttataccatgatgaaggaccagtatgcaaactatgtcgtccagaaaatgatcgatgtggcggagcccggtcaacggaaaatcgtgatgcacaaaatccgacctcacattgctacactcagaaaatacacgtatggaaaacatattctggctaagctggagaaatattacatgaagaatggagtggatctggggggcggaagtgagcaaaaactgattagtgaagaagatctc

SEQ ID NO: 582 - DNA, 2853 bp, Artificial Sequence
  blocking 8 PUF myc tag vector with ITRs
cctgcaggcagctgcgcgctcgctcgctcactgaggccgcccgggcgtcgggcgacctttggtcgcccggcctcagtgagcgagcgagcgcgcagagagggagtggccaactccatcactaggggttcctgcggccggtcgcgtctagttattaatgcatactagtaattggctccggtgcccgtcagtgggcagagcgcacatcgcccacagtccccgagaagttggggggaggggtcggcaattgaaccggtgcctagagaaggtggcgcggggtaaactgggaaagtgatgtcgtgtactggctccgcctttttcccgagggtgggggagaaccgtatataagtgcagtagtcgccgtgaacgttctttttcgcaacgggtttgccgccagaacacagaattccaggtaagtcccgcagccgtaacgaccttgggggggtgtgagattctcattctaattttgaagaatattaggtgtaaaagcaagaaatacaatgatcctgaggtgacacgcttatgttttacttttaaactaggtgaattcaagatctgctagcgccgccaccatggaccgtgtgctcaaaagaagtgctgaaggaagcaaccctcctaaaccactgaaaaaactacgcggaggatcgggacgaagccgactcttggaagacttcagaaacaatcggtatccgaaccttcagctgagagaaattgctggtcacatcatggaattttctcaagatcaacatggaagccggtttattgaacttaaactcgaacgagccaccccggccgaaaggcaattggtgttcaatgaaattcttcaggccgcataccaactcatggttgatgtttttgggaactatgttattcaaaagttttttgagttcgggtcactggagcaaaagttggcattggcagagcgaatccggggccatgttctgagcctcgctctccaaatgtacggtagttatgtcattcgcaaagcactcgagttcataccatcagatcaacagaatgagatggtgcgggagctggatgggcatgttttgaaatgcgtgaaagaccaaaacggtagctacgtagttgagaaatgcatcgaatgcgtccaaccacagtctctccaatttattatagatgcatttaagggtcaggttttcgcgctttctacgcacccgtatgggaaccgagtgattcagagaatcttggagcactgcctgccggatcagacactccctatcttggaggaattgcaccagcataccgaacaattggtgcaagatcaatacggttcatatgttattcggcacgttcttgagcatggaaggccagaggacaagtcaaagatcgtcgctgagattagaggtaacgtattggtgctctcacaacacaaatttgcatctaatgtggtggagaaatgtgttactcatgcttctagaacggaaagggcagttctcatagacgaagtttgcacaatgaatgatggtcctcatagcgcactttataccatgatgaaggaccagtatgcaaactatgtcgtccagaaaatgatcgatgtggcggagcccggtcaacggaaaatcgtgatgcacaaaatccgacctcacattgctacactcagaaaatacacgtatggaaaacatattctggctaagctggagaaatattacatgaagaatggagtggatctggggggcggaagtgagcaaaaactgattagtgaagaagatctctaatcgcggccgctcgaggattataaggatgacgacgataaattcgtcgagcaccaccaccaccaccactaataaggtttatccgatccaccggatctagataagatatccgatccaccggatctagataactgatcataatcagccataccacatttgtagaggttttacttgctttaaaaaacctcccacacctccccctgaacctgaaacataaaatgaatgcaattgttgttgttaatcaacctctggattacaaaatttgtgaaagattgactggtattcttaactatgttgctccttttacgctatgtggatacgctgctttaatgcctttgtatcatgctattgcttcccgtatggctttcattttctcctccttgtataaatcctggttgctgtctctttatgaggagttgtggcccgttgtcaggcaacgtggcgtggtgtgcactgtgtttgctgacgcaacccccactggttggggcattgccaccacctgtcagctcctttccgggactttcgctttccccctccctattgccacggcggaactcatcgccgcctgccttgcccgctgctggacaggggctcggctgttgggcactgacaattccgtggtgttgtcggggaaatcatcgtcctttccttggctgctcgcctgtgttgccacctggattctgcgcgggacgtccttctgctacgtcccttcggccctcaatccagcggaccttccttcccgcggcctgctgccggctctgcggcctcttccgcgtcttcgccttcgccctcagacgagtcggatctccctttgggccgcctccccgcaacttgtttattgcagcttataatggttacaaataaagcaatagcatcacaaatttcacaaataaagcatttttttcactgcattctagttgtggtttgtccaaactcatcaatgtatcttaacgcggtaaccacgtgcggacccaacggccgcaggaacccctagtgatggagttggccactccctctctgcgcgctcgctcgctcactgaggccgggcgaccaaaggtcgcccgacgcccgggctttgcccgggcggcctcagtgagcgagcgagcgcgcagctgcctgcagg

SEQ ID NO: 583 - protein, 1019 aa, Artificial Sequence
  dead Cas12d 4 point mutations
KKKHQSAAEKRQVKKLKNQEKAQKYASEPSPLQSDTAGVECSQKKTVVSHIASSKTLAKAMGLKSTLVMGDKLVITSFAASKAVGGAGYKSANIEKITDLQGRVIEEHERMFSADVGEKNIELSKNDCHTNVNNPVVTNIGKDYIGLKSRLEQEFFGKTFENDNLHVQLAYNILDIKKILGTYVNNIIYIFYNLNRAGTGRDERMYDDLIGTLYAYKPMEAQQTYLLKGDKDMRRFEEVKQLLQNTSAYYVYYGTLFEKVKAKSKKEQRAKEAEIDACTAHNYDVLRLLSLMAQLCMASVAGTAFKLAESALFNIEDVLSADLKEILDEAFSGAVNKLNDGFVQHSGNNLYVLQQLYPNETIERIAEKYYRLTVRKEDLNMGVNIKKLRELIVGQYFPEVLDKEYDLSKNGDSVVTYRSKIYTVMNYILLYYLEDHDSSRESMVEALRQNREGDEGKEEIYRQFAKKVWNGVSGLFGVCLNLFKTEKRNKFRSKVALPDVSGAAYMLSSENIDYFVKMLFFVCKFLDGKEINELLCALINKFDNIADILDAAAQCGSSVWFVDSYRFFERSRRISAQIRIVKNIASKDFKKSKKDSDESYPEQLYLDALALLGDVISKYKQNRDGSVVIDDQGNAVLTEQYKRFRYEFFEEIKRDESGGIKYKKSGKPEYNHQRRNFILNNVLKSKWFFYVVKYNRPSSCRELMKNKEILRFVLRDIPDSQVRRYFKAVQGEEAYASAEAMRTRLVDALSQFSVTACLDEVGGMTDKEFASQRAVDSKEKLRAIIRLYLTVAYLITKSMVKVNTRFSIAFSVLERDYYLLIDGKKKSSDYTGEDMLALTRKFVGEDAGLYREWKEKNAEAKDKYFDKAERKKVLRQNDKMIRKMHFTPHSLNYVQKNLESVQSNGLAAVIKEYANAVAALNIINRLDEYIGSARADSYYSLYCYCLQMYLSKNFSVGYLINVQKQLEEHHTYMKDLMWLLNIPFAYNLARYKNLSNEKLFYDEEAAAEKADKAENERGE

SEQ ID NO: 584 - DNA, 4243 bp, Artificial Sequence
  A01560 vector
gagggcctatttcccatgattccttcatatttgcatatacgatacaaggctgttagagagataattggaattaatttgactgtaaacacaaagatattagtacaaaatacgtgacgtagaaagtaataatttcttgggtagtttgcagttttaaaattatgttttaaaatggactatcatatgcttaccgtaacttgaaagtatttcgatttcttggctttatatatcttgtggaaaggacgaaacaccgtagccctgcagtaaggcagggttctaagaccagcagcagcagcagcagcagcagcattttttggtaccgatatcgtttaaacaggagtgggaattggctccggtgcccgtcagtgggcagagcgcacatcgcccacagtccccgagaagttggggggaggggtcggcaattgaaccggtgcctagagaaggtggcgcggggtaaactgggaaagtgatgtcgtgtactggctccgcctttttcccgagggtgggggagaaccgtatataagtgcagtagtcgccgtgaacgttctttttcgcaacgggtttgccgccagaacacagaattccaggtaagtcccgcagccgtaacgaccttgggggggtgtgagattctcattctaattttgaagaatattaggtgtaaaagcaagaaatacaatgatcctgaggtgacacgcttatgttttacttttaaactaggtgaaacgcgtgccgccaccatgaagaagaagcaccagagcgccgccgagaagaggcaagtgaagaagctcaagaatcaagagaaggcccagaagtacgctagcgagccttcccccctccagagcgatacagctggcgtggaatgctcccagaaaaagacagtcgtcagccacattgccagctccaagacactggccaaggctatgggactcaaatccacactggtcatgggcgacaagctggtcatcaccagctttgctgctagcaaggctgtcggaggcgctggctacaaaagcgctaacattgaaaaaatcacagatctgcaaggaagggtcattgaggagcacgaaaggatgtttagcgccgatgtcggagagaaaaatatcgaactgagcaagaatgactgccacaccaacgtcaacaaccccgtggtgaccaacatcggaaaggattacatcggactgaaatctaggctggagcaagagtttttcggcaagacattcgagaatgacaatctgcatgtgcagctggcctacaatatcctcgacatcaagaaaattctgggaacctatgtgaacaatatcatttatatcttctacaatctgaatagggctggcaccggcagagatgagaggatgtatgacgacctcatcggcacactgtacgcttacaaacccatggaggctcaacagacctatctgctcaaaggcgacaaggatatgaggaggtttgaggaggtgaaacagctgctgcaaaacacctccgcttactatgtgtattacggcacactgttcgagaaggtgaaggctaagagcaagaaggaacagagggctaaggaggccgaaatcgacgcttgtaccgcccataactacgatgtgctgagactgctgtccctcatggcgcagctgtgcatggcctccgtcgctggaacagcctttaagctggctgagtccgctctgttcaacattgaggatgtgctcagcgccgatctgaaggaaatcctcgatgaagccttctccggcgccgtgaacaagctcaatgacggattcgtgcagcactccggcaacaatctgtacgtgctccagcagctgtaccctaatgagaccatcgagagaatcgccgagaagtactacagactcaccgtgaggaaggaggatctgaacatgggagtcaacattaaaaagctgagggagctgatcgtgggccaatactttcccgaggtcctcgacaaagaatacgacctctccaagaatggagacagcgtggtgacatacagaagcaagatttataccgtgatgaattacattctgctgtattacctcgaggaccacgactccagcagagaaagcatggtcgaagctctgagacaaaacagagagggcgatgaaggcaaggaggagatctatagacagtttgccaagaaggtgtggaacggcgtgtccggactgtttggcgtgtgtctgaacctcttcaagaccgaaaagagaaacaagtttaggagcaaagtcgccctccccgatgtgtccggcgctgcctatatgctctcctccgagaacatcgactactttgtcaagatgctcttctttgtgtgtaagtttctggatggcaaagaaatcaacgagctgctgtgcgctctgatcaacaaatttgataatattgccgatattctggatgctgccgctcaatgtggctcctccgtctggttcgtggacagctataggttcttcgagagatctaggaggattagcgcccagattagaatcgtgaagaacatcgcttccaaggattttaagaaatccaagaaggattccgatgagagctaccccgagcagctgtatctggatgctctggctctgctcggagacgtcatctccaagtacaagcagaatagagatggcagcgtcgtcatcgatgaccaaggcaatgccgtgctgacagagcaatacaagaggtttagatatgaatttttcgaggagatcaagagggacgaaagcggcggcatcaagtacaagaagtccggaaaacccgagtacaaccatcagagaaggaattttattctgaataatgtgctgaaaagcaaatggtttttctatgtggtgaagtacaataggcccagcagctgcagagaactgatgaagaataaggaaattctgaggttcgtgctgagagacatccccgactcccaagtgagaagatactttaaggccgtccaaggagaggaagcttacgctagcgccgaagctatgaggacaagactggtcgacgctctgtcccaatttagcgtcacagcttgtctggatgaagtgggcggcatgacagacaaggaattcgcctcccagagggccgtcgatagcaaagaaaaactgagagccatcatcagactgtatctgacagtcgcctatctgattaccaagagcatggtgaaggtgaatacaaggtttagcattgcctttagcgtgctggagagggactactatctgctcattgacggcaagaagaaatccagcgactacaccggagaggatatgctggctctgaccagaaaatttgtgggcgaagatgctggactgtatagagagtggaaagagaagaacgctgaagccaaggacaaatattttgacaaggccgaaaggaagaaggtgctgagacagaacgataagatgatcagaaagatgcacttcacaccccactccctcaattacgtccaaaagaatctcgaaagcgtccagagcaacggactggccgccgtcatcaaggaatatgcaaatgccgtcgctgccctcaatatcatcaatagactggacgagtacattggctccgctagggctgatagctactactctctgtactgttactgcctccaaatgtatctgagcaagaacttcagcgtgggctacctcatcaacgtgcaaaagcagctggaggagcaccacacctacatgaaggatctcatgtggctgctcaacatccccttcgcttacaacctcgccagatacaaaaatctgtccaacgaaaaactcttttacgacgaggaagccgccgccgaaaaggctgacaaggctgagaacgagagaggcgaaggaagccccaagaagaaaaggaaggtcggcggatctgagcagaaactgattagcgaagaggatctctaagcggccgcgataatcaacctctggattacaaaatttgtgaaagattgactggtattcttaactatgttgctccttttacgctatgtggatacgctgctttaatgcctttgtatcatgctattgcttcccgtatggctttcattttctcctccttgtataaatcctggttagttcttgccacggcggaactcatcgccgcctgccttgcccgctgctggacaggggctcggctgttgggcactgacaattccgtgggttaacttgtttattgcagcttataatggttacaaataaagcaatagcatcacaaatttcacaaataaagcatttttttcactgcattctagttgtggtttgtccaaactcatcaatgtatctta

SEQ ID NO: 585 - DNA, 4587 bp, Artificial Sequence
  A01560 vector with ITR
cctgcaggcagctgcgcgctcgctcgctcactgaggccgcccgggcgtcgggcgacctttggtcgcccggcctcagtgagcgagcgagcgcgcagagagggagtggccaactccatcactaggggttcctgcggccggtcgcgtctagtaaccggctagttgatccgagctgagggcctatttcccatgattccttcatatttgcatatacgatacaaggctgttagagagataattggaattaatttgactgtaaacacaaagatattagtacaaaatacgtgacgtagaaagtaataatttcttgggtagtttgcagttttaaaattatgttttaaaatggactatcatatgcttaccgtaacttgaaagtatttcgatttcttggctttatatatcttgtggaaaggacgaaacaccgtagccctgcagtaaggcagggttctaagaccagcagcagcagcagcagcagcagcattttttggtaccgatatcgtttaaacaggagtgggaattggctccggtgcccgtcagtgggcagagcgcacatcgcccacagtccccgagaagttggggggaggggtcggcaattgaaccggtgcctagagaaggtggcgcggggtaaactgggaaagtgatgtcgtgtactggctccgcctttttcccgagggtgggggagaaccgtatataagtgcagtagtcgccgtgaacgttctttttcgcaacgggtttgccgccagaacacagaattccaggtaagtcccgcagccgtaacgaccttgggggggtgtgagattctcattctaattttgaagaatattaggtgtaaaagcaagaaatacaatgatcctgaggtgacacgcttatgttttacttttaaactaggtgaaacgcgtgccgccaccatgaagaagaagcaccagagcgccgccgagaagaggcaagtgaagaagctcaagaatcaagagaaggcccagaagtacgctagcgagccttcccccctccagagcgatacagctggcgtggaatgctcccagaaaaagacagtcgtcagccacattgccagctccaagacactggccaaggctatgggactcaaatccacactggtcatgggcgacaagctggtcatcaccagctttgctgctagcaaggctgtcggaggcgctggctacaaaagcgctaacattgaaaaaatcacagatctgcaaggaagggtcattgaggagcacgaaaggatgtttagcgccgatgtcggagagaaaaatatcgaactgagcaagaatgactgccacaccaacgtcaacaaccccgtggtgaccaacatcggaaaggattacatcggactgaaatctaggctggagcaagagtttttcggcaagacattcgagaatgacaatctgcatgtgcagctggcctacaatatcctcgacatcaagaaaattctgggaacctatgtgaacaatatcatttatatcttctacaatctgaatagggctggcaccggcagagatgagaggatgtatgacgacctcatcggcacactgtacgcttacaaacccatggaggctcaacagacctatctgctcaaaggcgacaaggatatgaggaggtttgaggaggtgaaacagctgctgcaaaacacctccgcttactatgtgtattacggcacactgttcgagaaggtgaaggctaagagcaagaaggaacagagggctaaggaggccgaaatcgacgcttgtaccgcccataactacgatgtgctgagactgctgtccctcatggcgcagctgtgcatggcctccgtcgctggaacagcctttaagctggctgagtccgctctgttcaacattgaggatgtgctcagcgccgatctgaaggaaatcctcgatgaagccttctccggcgccgtgaacaagctcaatgacggattcgtgcagcactccggcaacaatctgtacgtgctccagcagctgtaccctaatgagaccatcgagagaatcgccgagaagtactacagactcaccgtgaggaaggaggatctgaacatgggagtcaacattaaaaagctgagggagctgatcgtgggccaatactttcccgaggtcctcgacaaagaatacgacctctccaagaatggagacagcgtggtgacatacagaagcaagatttataccgtgatgaattacattctgctgtattacctcgaggaccacgactccagcagagaaagcatggtcgaagctctgagacaaaacagagagggcgatgaaggcaaggaggagatctatagacagtttgccaagaaggtgtggaacggcgtgtccggactgtttggcgtgtgtctgaacctcttcaagaccgaaaagagaaacaagtttaggagcaaagtcgccctccccgatgtgtccggcgctgcctatatgctctcctccgagaacatcgactactttgtcaagatgctcttctttgtgtgtaagtttctggatggcaaagaaatcaacgagctgctgtgcgctctgatcaacaaatttgataatattgccgatattctggatgctgccgctcaatgtggctcctccgtctggttcgtggacagctataggttcttcgagagatctaggaggattagcgcccagattagaatcgtgaagaacatcgcttccaaggattttaagaaatccaagaaggattccgatgagagctaccccgagcagctgtatctggatgctctggctctgctcggagacgtcatctccaagtacaagcagaatagagatggcagcgtcgtcatcgatgaccaaggcaatgccgtgctgacagagcaatacaagaggtttagatatgaatttttcgaggagatcaagagggacgaaagcggcggcatcaagtacaagaagtccggaaaacccgagtacaaccatcagagaaggaattttattctgaataatgtgctgaaaagcaaatggtttttctatgtggtgaagtacaataggcccagcagctgcagagaactgatgaagaataaggaaattctgaggttcgtgctgagagacatccccgactcccaagtgagaagatactttaaggccgtccaaggagaggaagcttacgctagcgccgaagctatgaggacaagactggtcgacgctctgtcccaatttagcgtcacagcttgtctggatgaagtgggcggcatgacagacaaggaattcgcctcccagagggccgtcgatagcaaagaaaaactgagagccatcatcagactgtatctgacagtcgcctatctgattaccaagagcatggtgaaggtgaatacaaggtttagcattgcctttagcgtgctggagagggactactatctgctcattgacggcaagaagaaatccagcgactacaccggagaggatatgctggctctgaccagaaaatttgtgggcgaagatgctggactgtatagagagtggaaagagaagaacgctgaagccaaggacaaatattttgacaaggccgaaaggaagaaggtgctgagacagaacgataagatgatcagaaagatgcacttcacaccccactccctcaattacgtccaaaagaatctcgaaagcgtccagagcaacggactggccgccgtcatcaaggaatatgcaaatgccgtcgctgccctcaatatcatcaatagactggacgagtacattggctccgctagggctgatagctactactctctgtactgttactgcctccaaatgtatctgagcaagaacttcagcgtgggctacctcatcaacgtgcaaaagcagctggaggagcaccacacctacatgaaggatctcatgtggctgctcaacatccccttcgcttacaacctcgccagatacaaaaatctgtccaacgaaaaactcttttacgacgaggaagccgccgccgaaaaggctgacaaggctgagaacgagagaggcgaaggaagccccaagaagaaaaggaaggtcggcggatctgagcagaaactgattagcgaagaggatctctaagcggccgcgataatcaacctctggattacaaaatttgtgaaagattgactggtattcttaactatgttgctccttttacgctatgtggatacgctgctttaatgcctttgtatcatgctattgcttcccgtatggctttcattttctcctccttgtataaatcctggttagttcttgccacggcggaactcatcgccgcctgccttgcccgctgctggacaggggctcggctgttgggcactgacaattccgtgggttaacttgtttattgcagcttataatggttacaaataaagcaatagcatcacaaatttcacaaataaagcatttttttcactgcattctagttgtggtttgtccaaactcatcaatgtatcttaacgcggtaaccacgtgcggacccaacggccgcaggaacccctagtgatggagttggccactccctctctgcgcgctcgctcgctcactgaggccgggcgaccaaaggtcgcccgacgcccgggctttgcccgggcggcctcagtgagcgagcgagcgcgcagctgcctgcagg

SEQ ID NO: 586 - protein, 1019 aa, Artificial Sequence
  dCas13d Seq212 H919A
KKKHQSAAEKRQVKKLKNQEKAQKYASEPSPLQSDTAGVECSQKKTVVSHIASSKTLAKAMGLKSTLVMGDKLVITSFAASKAVGGAGYKSANIEKITDLQGRVIEEHERMFSADVGEKNIELSKNDCHTNVNNPVVTNIGKDYIGLKSRLEQEFFGKTFENDNLHVQLAYNILDIKKILGTYVNNIIYIFYNLNRAGTGRDERMYDDLIGTLYAYKPMEAQQTYLLKGDKDMRRFEEVKQLLQNTSAYYVYYGTLFEKVKAKSKKEQRAKEAEIDACTAHNYDVLRLLSLMRQLCMHSVAGTAFKLAESALFNIEDVLSADLKEILDEAFSGAVNKLNDGFVQHSGNNLYVLQQLYPNETIERIAEKYYRLTVRKEDLNMGVNIKKLRELIVGQYFPEVLDKEYDLSKNGDSVVTYRSKIYTVMNYILLYYLEDHDSSRESMVEALRQNREGDEGKEEIYRQFAKKVWNGVSGLFGVCLNLFKTEKRNKFRSKVALPDVSGAAYMLSSENIDYFVKMLFFVCKFLDGKEINELLCALINKFDNIADILDAAAQCGSSVWFVDSYRFFERSRRISAQIRIVKNIASKDFKKSKKDSDESYPEQLYLDALALLGDVISKYKQNRDGSVVIDDQGNAVLTEQYKRFRYEFFEEIKRDESGGIKYKKSGKPEYNHQRRNFILNNVLKSKWFFYVVKYNRPSSCRELMKNKEILRFVLRDIPDSQVRRYFKAVQGEEAYASAEAMRTRLVDALSQFSVTACLDEVGGMTDKEFASQRAVDSKEKLRAIIRLYLTVAYLITKSMVKVNTRFSIAFSVLERDYYLLIDGKKKSSDYTGEDMLALTRKFVGEDAGLYREWKEKNAEAKDKYFDKAERKKVLRQNDKMIRKMHFTPHSLNYVQKNLESVQSNGLAAVIKEYRNAVAALNIINRLDEYIGSARADSYYSLYCYCLQMYLSKNFSVGYLINVQKQLEEHHTYMKDLMWLLNIPFAYNLARYKNLSNEKLFYDEEAAAEKADKAENERGE

SEQ ID NO: 587 - protein, 1019 aa, Artificial Sequence
  dCas13d Seq212 R914A
KKKHQSAAEKRQVKKLKNQEKAQKYASEPSPLQSDTAGVECSQKKTVVSHIASSKTLAKAMGLKSTLVMGDKLVITSFAASKAVGGAGYKSANIEKITDLQGRVIEEHERMFSADVGEKNIELSKNDCHTNVNNPVVTNIGKDYIGLKSRLEQEFFGKTFENDNLHVQLAYNILDIKKILGTYVNNIIYIFYNLNRAGTGRDERMYDDLIGTLYAYKPMEAQQTYLLKGDKDMRRFEEVKQLLQNTSAYYVYYGTLFEKVKAKSKKEQRAKEAEIDACTAHNYDVLRLLSLMRQLCMHSVAGTAFKLAESALFNIEDVLSADLKEILDEAFSGAVNKLNDGFVQHSGNNLYVLQQLYPNETIERIAEKYYRLTVRKEDLNMGVNIKKLRELIVGQYFPEVLDKEYDLSKNGDSVVTYRSKIYTVMNYILLYYLEDHDSSRESMVEALRQNREGDEGKEEIYRQFAKKVWNGVSGLFGVCLNLFKTEKRNKFRSKVALPDVSGAAYMLSSENIDYFVKMLFFVCKFLDGKEINELLCALINKFDNIADILDAAAQCGSSVWFVDSYRFFERSRRISAQIRIVKNIASKDFKKSKKDSDESYPEQLYLDALALLGDVISKYKQNRDGSVVIDDQGNAVLTEQYKRFRYEFFEEIKRDESGGIKYKKSGKPEYNHQRRNFILNNVLKSKWFFYVVKYNRPSSCRELMKNKEILRFVLRDIPDSQVRRYFKAVQGEEAYASAEAMRTRLVDALSQFSVTACLDEVGGMTDKEFASQRAVDSKEKLRAIIRLYLTVAYLITKSMVKVNTRFSIAFSVLERDYYLLIDGKKKSSDYTGEDMLALTRKFVGEDAGLYREWKEKNAEAKDKYFDKAERKKVLRQNDKMIRKMHFTPHSLNYVQKNLESVQSNGLAAVIKEYANAVAHLNIINRLDEYIGSARADSYYSLYCYCLQMYLSKNFSVGYLINVQKQLEEHHTYMKDLMWLLNIPFAYNLARYKNLSNEKLFYDEEAAAEKADKAENERGE

SEQ ID NO: 588 - protein, 1019 aa, Artificial Sequence
  dCas13d Seq212 R293A
KKKHQSAAEKRQVKKLKNQEKAQKYASEPSPLQSDTAGVECSQKKTVVSHIASSKTLAKAMGLKSTLVMGDKLVITSFAASKAVGGAGYKSANIEKITDLQGRVIEEHERMFSADVGEKNIELSKNDCHTNVNNPVVTNIGKDYIGLKSRLEQEFFGKTFENDNLHVQLAYNILDIKKILGTYVNNIIYIFYNLNRAGTGRDERMYDDLIGTLYAYKPMEAQQTYLLKGDKDMRRFEEVKQLLQNTSAYYVYYGTLFEKVKAKSKKEQRAKEAEIDACTAHNYDVLRLLSLMAQLCMHSVAGTAFKLAESALFNIEDVLSADLKEILDEAFSGAVNKLNDGFVQHSGNNLYVLQQLYPNETIERIAEKYYRLTVRKEDLNMGVNIKKLRELIVGQYFPEVLDKEYDLSKNGDSVVTYRSKIYTVMNYILLYYLEDHDSSRESMVEALRQNREGDEGKEEIYRQFAKKVWNGVSGLFGVCLNLFKTEKRNKFRSKVALPDVSGAAYMLSSENIDYFVKMLFFVCKFLDGKEINELLCALINKFDNIADILDAAAQCGSSVWFVDSYRFFERSRRISAQIRIVKNIASKDFKKSKKDSDESYPEQLYLDALALLGDVISKYKQNRDGSVVIDDQGNAVLTEQYKRFRYEFFEEIKRDESGGIKYKKSGKPEYNHQRRNFILNNVLKSKWFFYVVKYNRPSSCRELMKNKEILRFVLRDIPDSQVRRYFKAVQGEEAYASAEAMRTRLVDALSQFSVTACLDEVGGMTDKEFASQRAVDSKEKLRAIIRLYLTVAYLITKSMVKVNTRFSIAFSVLERDYYLLIDGKKKSSDYTGEDMLALTRKFVGEDAGLYREWKEKNAEAKDKYFDKAERKKVLRQNDKMIRKMHFTPHSLNYVQKNLESVQSNGLAAVIKEYRNAVAHLNIINRLDEYIGSARADSYYSLYCYCLQMYLSKNFSVGYLINVQKQLEEHHTYMKDLMWLLNIPFAYNLARYKNLSNEKLFYDEEAAAEKADKAENERGE

SEQ ID NO: 589 - protein, 1019 aa, Artificial Sequence
  dCas13d Seq212 H298A
KKKHQSAAEKRQVKKLKNQEKAQKYASEPSPLQSDTAGVECSQKKTVVSHIASSKTLAKAMGLKSTLVMGDKLVITSFAASKAVGGAGYKSANIEKITDLQGRVIEEHERMFSADVGEKNIELSKNDCHTNVNNPVVTNIGKDYIGLKSRLEQEFFGKTFENDNLHVQLAYNILDIKKILGTYVNNIIYIFYNLNRAGTGRDERMYDDLIGTLYAYKPMEAQQTYLLKGDKDMRRFEEVKQLLQNTSAYYVYYGTLFEKVKAKSKKEQRAKEAEIDACTAHNYDVLRLLSLMRQLCMASVAGTAFKLAESALFNIEDVLSADLKEILDEAFSGAVNKLNDGFVQHSGNNLYVLQQLYPNETIERIAEKYYRLTVRKEDLNMGVNIKKLRELIVGQYFPEVLDKEYDLSKNGDSVVTYRSKIYTVMNYILLYYLEDHDSSRESMVEALRQNREGDEGKEEIYRQFAKKVWNGVSGLFGVCLNLFKTEKRNKFRSKVALPDVSGAAYMLSSENIDYFVKMLFFVCKFLDGKEINELLCALINKFDNIADILDAAAQCGSSVWFVDSYRFFERSRRISAQIRIVKNIASKDFKKSKKDSDESYPEQLYLDALALLGDVISKYKQNRDGSVVIDDQGNAVLTEQYKRFRYEFFEEIKRDESGGIKYKKSGKPEYNHQRRNFILNNVLKSKWFFYVVKYNRPSSCRELMKNKEILRFVLRDIPDSQVRRYFKAVQGEEAYASAEAMRTRLVDALSQFSVTACLDEVGGMTDKEFASQRAVDSKEKLRAIIRLYLTVAYLITKSMVKVNTRFSIAFSVLERDYYLLIDGKKKSSDYTGEDMLALTRKFVGEDAGLYREWKEKNAEAKDKYFDKAERKKVLRQNDKMIRKMHFTPHSLNYVQKNLESVQSNGLAAVIKEYRNAVAHLNIINRLDEYIGSARADSYYSLYCYCLQMYLSKNFSVGYLINVQKQLEEHHTYMKDLMWLLNIPFAYNLARYKNLSNEKLFYDEEAAAEKADKAENERGE

SEQ ID NO: 590 - DNA, 4243 bp, Artificial Sequence
  dCas13d AAV vector
gagggcctatttcccatgattccttcatatttgcatatacgatacaaggctgttagagagataattggaattaatttgactgtaaacacaaagatattagtacaaaatacgtgacgtagaaagtaataatttcttgggtagtttgcagttttaaaattatgttttaaaatggactatcatatgcttaccgtaacttgaaagtatttcgatttcttggctttatatatcttgtggaaaggacgaaacaccgtagccctgcagtaaggcagggttctaagaccagcagcagcagcagcagcagcagcattttttggtaccgatatcgtttaaacaggagtgggaattggctccggtgcccgtcagtgggcagagcgcacatcgcccacagtccccgagaagttggggggaggggtcggcaattgaaccggtgcctagagaaggtggcgcggggtaaactgggaaagtgatgtcgtgtactggctccgcctttttcccgagggtgggggagaaccgtatataagtgcagtagtcgccgtgaacgttctttttcgcaacgggtttgccgccagaacacagaattccaggtaagtcccgcagccgtaacgaccttgggggggtgtgagattctcattctaattttgaagaatattaggtgtaaaagcaagaaatacaatgatcctgaggtgacacgcttatgttttacttttaaactaggtgaaacgcgtgccgccaccatgaagaagaagcaccagagcgccgccgagaagaggcaagtgaagaagctcaagaatcaagagaaggcccagaagtacgctagcgagccttcccccctccagagcgatacagctggcgtggaatgctcccagaaaaagacagtcgtcagccacattgccagctccaagacactggccaaggctatgggactcaaatccacactggtcatgggcgacaagctggtcatcaccagctttgctgctagcaaggctgtcggaggcgctggctacaaaagcgctaacattgaaaaaatcacagatctgcaaggaagggtcattgaggagcacgaaaggatgtttagcgccgatgtcggagagaaaaatatcgaactgagcaagaatgactgccacaccaacgtcaacaaccccgtggtgaccaacatcggaaaggattacatcggactgaaatctaggctggagcaagagtttttcggcaagacattcgagaatgacaatctgcatgtgcagctggcctacaatatcctcgacatcaagaaaattctgggaacctatgtgaacaatatcatttatatcttctacaatctgaatagggctggcaccggcagagatgagaggatgtatgacgacctcatcggcacactgtacgcttacaaacccatggaggctcaacagacctatctgctcaaaggcgacaaggatatgaggaggtttgaggaggtgaaacagctgctgcaaaacacctccgcttactatgtgtattacggcacactgttcgagaaggtgaaggctaagagcaagaaggaacagagggctaaggaggccgaaatcgacgcttgtaccgcccataactacgatgtgctgagactgctgtccctcatgaggcagctgtgcatgcactccgtcgctggaacagcctttaagctggctgagtccgctctgttcaacattgaggatgtgctcagcgccgatctgaaggaaatcctcgatgaagccttctccggcgccgtgaacaagctcaatgacggattcgtgcagcactccggcaacaatctgtacgtgctccagcagctgtaccctaatgagaccatcgagagaatcgccgagaagtactacagactcaccgtgaggaaggaggatctgaacatgggagtcaacattaaaaagctgagggagctgatcgtgggccaatactttcccgaggtcctcgacaaagaatacgacctctccaagaatggagacagcgtggtgacatacagaagcaagatttataccgtgatgaattacattctgctgtattacctcgaggaccacgactccagcagagaaagcatggtcgaagctctgagacaaaacagagagggcgatgaaggcaaggaggagatctatagacagtttgccaagaaggtgtggaacggcgtgtccggactgtttggcgtgtgtctgaacctcttcaagaccgaaaagagaaacaagtttaggagcaaagtcgccctccccgatgtgtccggcgctgcctatatgctctcctccgagaacatcgactactttgtcaagatgctcttctttgtgtgtaagtttctggatggcaaagaaatcaacgagctgctgtgcgctctgatcaacaaatttgataatattgccgatattctggatgctgccgctcaatgtggctcctccgtctggttcgtggacagctataggttcttcgagagatctaggaggattagcgcccagattagaatcgtgaagaacatcgcttccaaggattttaagaaatccaagaaggattccgatgagagctaccccgagcagctgtatctggatgctctggctctgctcggagacgtcatctccaagtacaagcagaatagagatggcagcgtcgtcatcgatgaccaaggcaatgccgtgctgacagagcaatacaagaggtttagatatgaatttttcgaggagatcaagagggacgaaagcggcggcatcaagtacaagaagtccggaaaacccgagtacaaccatcagagaaggaattttattctgaataatgtgctgaaaagcaaatggtttttctatgtggtgaagtacaataggcccagcagctgcagagaactgatgaagaataaggaaattctgaggttcgtgctgagagacatccccgactcccaagtgagaagatactttaaggccgtccaaggagaggaagcttacgctagcgccgaagctatgaggacaagactggtcgacgctctgtcccaatttagcgtcacagcttgtctggatgaagtgggcggcatgacagacaaggaattcgcctcccagagggccgtcgatagcaaagaaaaactgagagccatcatcagactgtatctgacagtcgcctatctgattaccaagagcatggtgaaggtgaatacaaggtttagcattgcctttagcgtgctggagagggactactatctgctcattgacggcaagaagaaatccagcgactacaccggagaggatatgctggctctgaccagaaaatttgtgggcgaagatgctggactgtatagagagtggaaagagaagaacgctgaagccaaggacaaatattttgacaaggccgaaaggaagaaggtgctgagacagaacgataagatgatcagaaagatgcacttcacaccccactccctcaattacgtccaaaagaatctcgaaagcgtccagagcaacggactggccgccgtcatcaaggaatatagaaatgccgtcgctgccctcaatatcatcaatagactggacgagtacattggctccgctagggctgatagctactactctctgtactgttactgcctccaaatgtatctgagcaagaacttcagcgtgggctacctcatcaacgtgcaaaagcagctggaggagcaccacacctacatgaaggatctcatgtggctgctcaacatccccttcgcttacaacctcgccagatacaaaaatctgtccaacgaaaaactcttttacgacgaggaagccgccgccgaaaaggctgacaaggctgagaacgagagaggcgaaggaagccccaagaagaaaaggaaggtcggcggatctgagcagaaactgattagcgaagaggatctctaagcggccgcgataatcaacctctggattacaaaatttgtgaaagattgactggtattcttaactatgttgctccttttacgctatgtggatacgctgctttaatgcctttgtatcatgctattgcttcccgtatggctttcattttctcctccttgtataaatcctggttagttcttgccacggcggaactcatcgccgcctgccttgcccgctgctggacaggggctcggctgttgggcactgacaattccgtgggttaacttgtttattgcagcttataatggttacaaataaagcaatagcatcacaaatttcacaaataaagcatttttttcactgcattctagttgtggtttgtccaaactcatcaatgtatctta

SEQ ID NO: 591 - DNA, 4587 bp, Artificial Sequence
  dCas13d AAV vector with ITR
cctgcaggcagctgcgcgctcgctcgctcactgaggccgcccgggcgtcgggcgacctttggtcgcccggcctcagtgagcgagcgagcgcgcagagagggagtggccaactccatcactaggggttcctgcggccggtcgcgtctagtaaccggctagttgatccgagctgagggcctatttcccatgattccttcatatttgcatatacgatacaaggctgttagagagataattggaattaatttgactgtaaacacaaagatattagtacaaaatacgtgacgtagaaagtaataatttcttgggtagtttgcagttttaaaattatgttttaaaatggactatcatatgcttaccgtaacttgaaagtatttcgatttcttggctttatatatcttgtggaaaggacgaaacaccgtagccctgcagtaaggcagggttctaagaccagcagcagcagcagcagcagcagcattttttggtaccgatatcgtttaaacaggagtgggaattggctccggtgcccgtcagtgggcagagcgcacatcgcccacagtccccgagaagttggggggaggggtcggcaattgaaccggtgcctagagaaggtggcgcggggtaaactgggaaagtgatgtcgtgtactggctccgcctttttcccgagggtgggggagaaccgtatataagtgcagtagtcgccgtgaacgttctttttcgcaacgggtttgccgccagaacacagaattccaggtaagtcccgcagccgtaacgaccttgggggggtgtgagattctcattctaattttgaagaatattaggtgtaaaagcaagaaatacaatgatcctgaggtgacacgcttatgttttacttttaaactaggtgaaacgcgtgccgccaccatgaagaagaagcaccagagcgccgccgagaagaggcaagtgaagaagctcaagaatcaagagaaggcccagaagtacgctagcgagccttcccccctccagagcgatacagctggcgtggaatgctcccagaaaaagacagtcgtcagccacattgccagctccaagacactggccaaggctatgggactcaaatccacactggtcatgggcgacaagctggtcatcaccagctttgctgctagcaaggctgtcggaggcgctggctacaaaagcgctaacattgaaaaaatcacagatctgcaaggaagggtcattgaggagcacgaaaggatgtttagcgccgatgtcggagagaaaaatatcgaactgagcaagaatgactgccacaccaacgtcaacaaccccgtggtgaccaacatcggaaaggattacatcggactgaaatctaggctggagcaagagtttttcggcaagacattcgagaatgacaatctgcatgtgcagctggcctacaatatcctcgacatcaagaaaattctgggaacctatgtgaacaatatcatttatatcttctacaatctgaatagggctggcaccggcagagatgagaggatgtatgacgacctcatcggcacactgtacgcttacaaacccatggaggctcaacagacctatctgctcaaaggcgacaaggatatgaggaggtttgaggaggtgaaacagctgctgcaaaacacctccgcttactatgtgtattacggcacactgttcgagaaggtgaaggctaagagcaagaaggaacagagggctaaggaggccgaaatcgacgcttgtaccgcccataactacgatgtgctgagactgctgtccctcatgaggcagctgtgcatgcactccgtcgctggaacagcctttaagctggctgagtccgctctgttcaacattgaggatgtgctcagcgccgatctgaaggaaatcctcgatgaagccttctccggcgccgtgaacaagctcaatgacggattcgtgcagcactccggcaacaatctgtacgtgctccagcagctgtaccctaatgagaccatcgagagaatcgccgagaagtactacagactcaccgtgaggaaggaggatctgaacatgggagtcaacattaaaaagctgagggagctgatcgtgggccaatactttcccgaggtcctcgacaaagaatacgacctctccaagaatggagacagcgtggtgacatacagaagcaagatttataccgtgatgaattacattctgctgtattacctcgaggaccacgactccagcagagaaagcatggtcgaagctctgagacaaaacagagagggcgatgaaggcaaggaggagatctatagacagtttgccaagaaggtgtggaacggcgtgtccggactgtttggcgtgtgtctgaacctcttcaagaccgaaaagagaaacaagtttaggagcaaagtcgccctccccgatgtgtccggcgctgcctatatgctctcctccgagaacatcgactactttgtcaagatgctcttctttgtgtgtaagtttctggatggcaaagaaatcaacgagctgctgtgcgctctgatcaacaaatttgataatattgccgatattctggatgctgccgctcaatgtggctcctccgtctggttcgtggacagctataggttcttcgagagatctaggaggattagcgcccagattagaatcgtgaagaacatcgcttccaaggattttaagaaatccaagaaggattccgatgagagctaccccgagcagctgtatctggatgctctggctctgctcggagacgtcatctccaagtacaagcagaatagagatggcagcgtcgtcatcgatgaccaaggcaatgccgtgctgacagagcaatacaagaggtttagatatgaatttttcgaggagatcaagagggacgaaagcggcggcatcaagtacaagaagtccggaaaacccgagtacaaccatcagagaaggaattttattctgaataatgtgctgaaaagcaaatggtttttctatgtggtgaagtacaataggcccagcagctgcagagaactgatgaagaataaggaaattctgaggttcgtgctgagagacatccccgactcccaagtgagaagatactttaaggccgtccaaggagaggaagcttacgctagcgccgaagctatgaggacaagactggtcgacgctctgtcccaatttagcgtcacagcttgtctggatgaagtgggcggcatgacagacaaggaattcgcctcccagagggccgtcgatagcaaagaaaaactgagagccatcatcagactgtatctgacagtcgcctatctgattaccaagagcatggtgaaggtgaatacaaggtttagcattgcctttagcgtgctggagagggactactatctgctcattgacggcaagaagaaatccagcgactacaccggagaggatatgctggctctgaccagaaaatttgtgggcgaagatgctggactgtatagagagtggaaagagaagaacgctgaagccaaggacaaatattttgacaaggccgaaaggaagaaggtgctgagacagaacgataagatgatcagaaagatgcacttcacaccccactccctcaattacgtccaaaagaatctcgaaagcgtccagagcaacggactggccgccgtcatcaaggaatatagaaatgccgtcgctgccctcaatatcatcaatagactggacgagtacattggctccgctagggctgatagctactactctctgtactgttactgcctccaaatgtatctgagcaagaacttcagcgtgggctacctcatcaacgtgcaaaagcagctggaggagcaccacacctacatgaaggatctcatgtggctgctcaacatccccttcgcttacaacctcgccagatacaaaaatctgtccaacgaaaaactcttttacgacgaggaagccgccgccgaaaaggctgacaaggctgagaacgagagaggcgaaggaagccccaagaagaaaaggaaggtcggcggatctgagcagaaactgattagcgaagaggatctctaagcggccgcgataatcaacctctggattacaaaatttgtgaaagattgactggtattcttaactatgttgctccttttacgctatgtggatacgctgctttaatgcctttgtatcatgctattgcttcccgtatggctttcattttctcctccttgtataaatcctggttagttcttgccacggcggaactcatcgccgcctgccttgcccgctgctggacaggggctcggctgttgggcactgacaattccgtgggttaacttgtttattgcagcttataatggttacaaataaagcaatagcatcacaaatttcacaaataaagcatttttttcactgcattctagttgtggtttgtccaaactcatcaatgtatcttaacgcggtaaccacgtgcggacccaacggccgcaggaacccctagtgatggagttggccactccctctctgcgcgctcgctcgctcactgaggccgggcgaccaaaggtcgcccgacgcccgggctttgcccgggcggcctcagtgagcgagcgagcgcgcagctgcctgcagg

SEQ ID NO: 592 - DNA, 4243 bp, Artificial Sequence
  dCas13d AAV vector
gagggcctatttcccatgattccttcatatttgcatatacgatacaaggctgttagagagataattggaattaatttgactgtaaacacaaagatattagtacaaaatacgtgacgtagaaagtaataatttcttgggtagtttgcagttttaaaattatgttttaaaatggactatcatatgcttaccgtaacttgaaagtatttcgatttcttggctttatatatcttgtggaaaggacgaaacaccgtagccctgcagtaaggcagggttctaagaccagcagcagcagcagcagcagcagcattttttggtaccgatatcgtttaaacaggagtgggaattggctccggtgcccgtcagtgggcagagcgcacatcgcccacagtccccgagaagttggggggaggggtcggcaattgaaccggtgcctagagaaggtggcgcggggtaaactgggaaagtgatgtcgtgtactggctccgcctttttcccgagggtgggggagaaccgtatataagtgcagtagtcgccgtgaacgttctttttcgcaacgggtttgccgccagaacacagaattccaggtaagtcccgcagccgtaacgaccttgggggggtgtgagattctcattctaattttgaagaatattaggtgtaaaagcaagaaatacaatgatcctgaggtgacacgcttatgttttacttttaaactaggtgaaacgcgtgccgccaccatgaagaagaagcaccagagcgccgccgagaagaggcaagtgaagaagctcaagaatcaagagaaggcccagaagtacgctagcgagccttcccccctccagagcgatacagctggcgtggaatgctcccagaaaaagacagtcgtcagccacattgccagctccaagacactggccaaggctatgggactcaaatccacactggtcatgggcgacaagctggtcatcaccagctttgctgctagcaaggctgtcggaggcgctggctacaaaagcgctaacattgaaaaaatcacagatctgcaaggaagggtcattgaggagcacgaaaggatgtttagcgccgatgtcggagagaaaaatatcgaactgagcaagaatgactgccacaccaacgtcaacaaccccgtggtgaccaacatcggaaaggattacatcggactgaaatctaggctggagcaagagtttttcggcaagacattcgagaatgacaatctgcatgtgcagctggcctacaatatcctcgacatcaagaaaattctgggaacctatgtgaacaatatcatttatatcttctacaatctgaatagggctggcaccggcagagatgagaggatgtatgacgacctcatcggcacactgtacgcttacaaacccatggaggctcaacagacctatctgctcaaaggcgacaaggatatgaggaggtttgaggaggtgaaacagctgctgcaaaacacctccgcttactatgtgtattacggcacactgttcgagaaggtgaaggctaagagcaagaaggaacagagggctaaggaggccgaaatcgacgcttgtaccgcccataactacgatgtgctgagactgctgtccctcatgaggcagctgtgcatgcactccgtcgctggaacagcctttaagctggctgagtccgctctgttcaacattgaggatgtgctcagcgccgatctgaaggaaatcctcgatgaagccttctccggcgccgtgaacaagctcaatgacggattcgtgcagcactccggcaacaatctgtacgtgctccagcagctgtaccctaatgagaccatcgagagaatcgccgagaagtactacagactcaccgtgaggaaggaggatctgaacatgggagtcaacattaaaaagctgagggagctgatcgtgggccaatactttcccgaggtcctcgacaaagaatacgacctctccaagaatggagacagcgtggtgacatacagaagcaagatttataccgtgatgaattacattctgctgtattacctcgaggaccacgactccagcagagaaagcatggtcgaagctctgagacaaaacagagagggcgatgaaggcaaggaggagatctatagacagtttgccaagaaggtgtggaacggcgtgtccggactgtttggcgtgtgtctgaacctcttcaagaccgaaaagagaaacaagtttaggagcaaagtcgccctccccgatgtgtccggcgctgcctatatgctctcctccgagaacatcgactactttgtcaagatgctcttctttgtgtgtaagtttctggatggcaaagaaatcaacgagctgctgtgcgctctgatcaacaaatttgataatattgccgatattctggatgctgccgctcaatgtggctcctccgtctggttcgtggacagctataggttcttcgagagatctaggaggattagcgcccagattagaatcgtgaagaacatcgcttccaaggattttaagaaatccaagaaggattccgatgagagctaccccgagcagctgtatctggatgctctggctctgctcggagacgtcatctccaagtacaagcagaatagagatggcagcgtcgtcatcgatgaccaaggcaatgccgtgctgacagagcaatacaagaggtttagatatgaatttttcgaggagatcaagagggacgaaagcggcggcatcaagtacaagaagtccggaaaacccgagtacaaccatcagagaaggaattttattctgaataatgtgctgaaaagcaaatggtttttctatgtggtgaagtacaataggcccagcagctgcagagaactgatgaagaataaggaaattctgaggttcgtgctgagagacatccccgactcccaagtgagaagatactttaaggccgtccaaggagaggaagcttacgctagcgccgaagctatgaggacaagactggtcgacgctctgtcccaatttagcgtcacagcttgtctggatgaagtgggcggcatgacagacaaggaattcgcctcccagagggccgtcgatagcaaagaaaaactgagagccatcatcagactgtatctgacagtcgcctatctgattaccaagagcatggtgaaggtgaatacaaggtttagcattgcctttagcgtgctggagagggactactatctgctcattgacggcaagaagaaatccagcgactacaccggagaggatatgctggctctgaccagaaaatttgtgggcgaagatgctggactgtatagagagtggaaagagaagaacgctgaagccaaggacaaatattttgacaaggccgaaaggaagaaggtgctgagacagaacgataagatgatcagaaagatgcacttcacaccccactccctcaattacgtccaaaagaatctcgaaagcgtccagagcaacggactggccgccgtcatcaaggaatatgcaaatgccgtcgctcacctcaatatcatcaatagactggacgagtacattggctccgctagggctgatagctactactctctgtactgttactgcctccaaatgtatctgagcaagaacttcagcgtgggctacctcatcaacgtgcaaaagcagctggaggagcaccacacctacatgaaggatctcatgtggctgctcaacatccccttcgcttacaacctcgccagatacaaaaatctgtccaacgaaaaactcttttacgacgaggaagccgccgccgaaaaggctgacaaggctgagaacgagagaggcgaaggaagccccaagaagaaaaggaaggtcggcggatctgagcagaaactgattagcgaagaggatctctaagcggccgcgataatcaacctctggattacaaaatttgtgaaagattgactggtattcttaactatgttgctccttttacgctatgtggatacgctgctttaatgcctttgtatcatgctattgcttcccgtatggctttcattttctcctccttgtataaatcctggttagttcttgccacggcggaactcatcgccgcctgccttgcccgctgctggacaggggctcggctgttgggcactgacaattccgtgggttaacttgtttattgcagcttataatggttacaaataaagcaatagcatcacaaatttcacaaataaagcatttttttcactgcattctagttgtggtttgtccaaactcatcaatgtatctta

SEQ ID NO: 593 - DNA, 4587 bp, Artificial Sequence
  dCas13d AAV vector with ITR
cctgcaggcagctgcgcgctcgctcgctcactgaggccgcccgggcgtcgggcgacctttggtcgcccggcctcagtgagcgagcgagcgcgcagagagggagtggccaactccatcactaggggttcctgcggccggtcgcgtctagtaaccggctagttgatccgagctgagggcctatttcccatgattccttcatatttgcatatacgatacaaggctgttagagagataattggaattaatttgactgtaaacacaaagatattagtacaaaatacgtgacgtagaaagtaataatttcttgggtagtttgcagttttaaaattatgttttaaaatggactatcatatgcttaccgtaacttgaaagtatttcgatttcttggctttatatatcttgtggaaaggacgaaacaccgtagccctgcagtaaggcagggttctaagaccagcagcagcagcagcagcagcagcattttttggtaccgatatcgtttaaacaggagtgggaattggctccggtgcccgtcagtgggcagagcgcacatcgcccacagtccccgagaagttggggggaggggtcggcaattgaaccggtgcctagagaaggtggcgcggggtaaactgggaaagtgatgtcgtgtactggctccgcctttttcccgagggtgggggagaaccgtatataagtgcagtagtcgccgtgaacgttctttttcgcaacgggtttgccgccagaacacagaattccaggtaagtcccgcagccgtaacgaccttgggggggtgtgagattctcattctaattttgaagaatattaggtgtaaaagcaagaaatacaatgatcctgaggtgacacgcttatgttttacttttaaactaggtgaaacgcgtgccgccaccatgaagaagaagcaccagagcgccgccgagaagaggcaagtgaagaagctcaagaatcaagagaaggcccagaagtacgctagcgagccttcccccctccagagcgatacagctggcgtggaatgctcccagaaaaagacagtcgtcagccacattgccagctccaagacactggccaaggctatgggactcaaatccacactggtcatgggcgacaagctggtcatcaccagctttgctgctagcaaggctgtcggaggcgctggctacaaaagcgctaacattgaaaaaatcacagatctgcaaggaagggtcattgaggagcacgaaaggatgtttagcgccgatgtcggagagaaaaatatcgaactgagcaagaatgactgccacaccaacgtcaacaaccccgtggtgaccaacatcggaaaggattacatcggactgaaatctaggctggagcaagagtttttcggcaagacattcgagaatgacaatctgcatgtgcagctggcctacaatatcctcgacatcaagaaaattctgggaacctatgtgaacaatatcatttatatcttctacaatctgaatagggctggcaccggcagagatgagaggatgtatgacgacctcatcggcacactgtacgcttacaaacccatggaggctcaacagacctatctgctcaaaggcgacaaggatatgaggaggtttgaggaggtgaaacagctgctgcaaaacacctccgcttactatgtgtattacggcacactgttcgagaaggtgaaggctaagagcaagaaggaacagagggctaaggaggccgaaatcgacgcttgtaccgcccataactacgatgtgctgagactgctgtccctcatgaggcagctgtgcatgcactccgtcgctggaacagcctttaagctggctgagtccgctctgttcaacattgaggatgtgctcagcgccgatctgaaggaaatcctcgatgaagccttctccggcgccgtgaacaagctcaatgacggattcgtgcagcactccggcaacaatctgtacgtgctccagcagctgtaccctaatgagaccatcgagagaatcgccgagaagtactacagactcaccgtgaggaaggaggatctgaacatgggagtcaacattaaaaagctgagggagctgatcgtgggccaatactttcccgaggtcctcgacaaagaatacgacctctccaagaatggagacagcgtggtgacatacagaagcaagatttataccgtgatgaattacattctgctgtattacctcgaggaccacgactccagcagagaaagcatggtcgaagctctgagacaaaacagagagggcgatgaaggcaaggaggagatctatagacagtttgccaagaaggtgtggaacggcgtgtccggactgtttggcgtgtgtctgaacctcttcaagaccgaaaagagaaacaagtttaggagcaaagtcgccctccccgatgtgtccggcgctgcctatatgctctcctccgagaacatcgactactttgtcaagatgctcttctttgtgtgtaagtttctggatggcaaagaaatcaacgagctgctgtgcgctctgatcaacaaatttgataatattgccgatattctggatgctgccgctcaatgtggctcctccgtctggttcgtggacagctataggttcttcgagagatctaggaggattagcgcccagattagaatcgtgaagaacatcgcttccaaggattttaagaaatccaagaaggattccgatgagagctaccccgagcagctgtatctggatgctctggctctgctcggagacgtcatctccaagtacaagcagaatagagatggcagcgtcgtcatcgatgaccaaggcaatgccgtgctgacagagcaatacaagaggtttagatatgaatttttcgaggagatcaagagggacgaaagcggcggcatcaagtacaagaagtccggaaaacccgagtacaaccatcagagaaggaattttattctgaataatgtgctgaaaagcaaatggtttttctatgtggtgaagtacaataggcccagcagctgcagagaactgatgaagaataaggaaattctgaggttcgtgctgagagacatccccgactcccaagtgagaagatactttaaggccgtccaaggagaggaagcttacgctagcgccgaagctatgaggacaagactggtcgacgctctgtcccaatttagcgtcacagcttgtctggatgaagtgggcggcatgacagacaaggaattcgcctcccagagggccgtcgatagcaaagaaaaactgagagccatcatcagactgtatctgacagtcgcctatctgattaccaagagcatggtgaaggtgaatacaaggtttagcattgcctttagcgtgctggagagggactactatctgctcattgacggcaagaagaaatccagcgactacaccggagaggatatgctggctctgaccagaaaatttgtgggcgaagatgctggactgtatagagagtggaaagagaagaacgctgaagccaaggacaaatattttgacaaggccgaaaggaagaaggtgctgagacagaacgataagatgatcagaaagatgcacttcacaccccactccctcaattacgtccaaaagaatctcgaaagcgtccagagcaacggactggccgccgtcatcaaggaatatgcaaatgccgtcgctcacctcaatatcatcaatagactggacgagtacattggctccgctagggctgatagctactactctctgtactgttactgcctccaaatgtatctgagcaagaacttcagcgtgggctacctcatcaacgtgcaaaagcagctggaggagcaccacacctacatgaaggatctcatgtggctgctcaacatccccttcgcttacaacctcgccagatacaaaaatctgtccaacgaaaaactcttttacgacgaggaagccgccgccgaaaaggctgacaaggctgagaacgagagaggcgaaggaagccccaagaagaaaaggaaggtcggcggatctgagcagaaactgattagcgaagaggatctctaagcggccgcgataatcaacctctggattacaaaatttgtgaaagattgactggtattcttaactatgttgctccttttacgctatgtggatacgctgctttaatgcctttgtatcatgctattgcttcccgtatggctttcattttctcctccttgtataaatcctggttagttcttgccacggcggaactcatcgccgcctgccttgcccgctgctggacaggggctcggctgttgggcactgacaattccgtgggttaacttgtttattgcagcttataatggttacaaataaagcaatagcatcacaaatttcacaaataaagcatttttttcactgcattctagttgtggtttgtccaaactcatcaatgtatcttaacgcggtaaccacgtgcggacccaacggccgcaggaacccctagtgatggagttggccactccctctctgcgcgctcgctcgctcactgaggccgggcgaccaaaggtcgcccgacgcccgggctttgcccgggcggcctcagtgagcgagcgagcgcgcagctgcctgcagg

SEQ ID NO: 594 - DNA, 4243 bp, Artificial Sequence
  dCas13d AAV vector
gagggcctatttcccatgattccttcatatttgcatatacgatacaaggctgttagagagataattggaattaatttgactgtaaacacaaagatattagtacaaaatacgtgacgtagaaagtaataatttcttgggtagtttgcagttttaaaattatgttttaaaatggactatcatatgcttaccgtaacttgaaagtatttcgatttcttggctttatatatcttgtggaaaggacgaaacaccgtagccctgcagtaaggcagggttctaagaccagcagcagcagcagcagcagcagcattttttggtaccgatatcgtttaaacaggagtgggaattggctccggtgcccgtcagtgggcagagcgcacatcgcccacagtccccgagaagttggggggaggggtcggcaattgaaccggtgcctagagaaggtggcgcggggtaaactgggaaagtgatgtcgtgtactggctccgcctttttcccgagggtgggggagaaccgtatataagtgcagtagtcgccgtgaacgttctttttcgcaacgggtttgccgccagaacacagaattccaggtaagtcccgcagccgtaacgaccttgggggggtgtgagattctcattctaattttgaagaatattaggtgtaaaagcaagaaatacaatgatcctgaggtgacacgcttatgttttacttttaaactaggtgaaacgcgtgccgccaccatgaagaagaagcaccagagcgccgccgagaagaggcaagtgaagaagctcaagaatcaagagaaggcccagaagtacgctagcgagccttcccccctccagagcgatacagctggcgtggaatgctcccagaaaaagacagtcgtcagccacattgccagctccaagacactggccaaggctatgggactcaaatccacactggtcatgggcgacaagctggtcatcaccagctttgctgctagcaaggctgtcggaggcgctggctacaaaagcgctaacattgaaaaaatcacagatctgcaaggaagggtcattgaggagcacgaaaggatgtttagcgccgatgtcggagagaaaaatatcgaactgagcaagaatgactgccacaccaacgtcaacaaccccgtggtgaccaacatcggaaaggattacatcggactgaaatctaggctggagcaagagtttttcggcaagacattcgagaatgacaatctgcatgtgcagctggcctacaatatcctcgacatcaagaaaattctgggaacctatgtgaacaatatcatttatatcttctacaatctgaatagggctggcaccggcagagatgagaggatgtatgacgacctcatcggcacactgtacgcttacaaacccatggaggctcaacagacctatctgctcaaaggcgacaaggatatgaggaggtttgaggaggtgaaacagctgctgcaaaacacctccgcttactatgtgtattacggcacactgttcgagaaggtgaaggctaagagcaagaaggaacagagggctaaggaggccgaaatcgacgcttgtaccgcccataactacgatgtgctgagactgctgtccctcatggcgcagctgtgcatgcactccgtcgctggaacagcctttaagctggctgagtccgctctgttcaacattgaggatgtgctcagcgccgatctgaaggaaatcctcgatgaagccttctccggcgccgtgaacaagctcaatgacggattcgtgcagcactccggcaacaatctgtacgtgctccagcagctgtaccctaatgagaccatcgagagaatcgccgagaagtactacagactcaccgtgaggaaggaggatctgaacatgggagtcaacattaaaaagctgagggagctgatcgtgggccaatactttcccgaggtcctcgacaaagaatacgacctctccaagaatggagacagcgtggtgacatacagaagcaagatttataccgtgatgaattacattctgctgtattacctcgaggaccacgactccagcagagaaagcatggtcgaagctctgagacaaaacagagagggcgatgaaggcaaggaggagatctatagacagtttgccaagaaggtgtggaacggcgtgtccggactgtttggcgtgtgtctgaacctcttcaagaccgaaaagagaaacaagtttaggagcaaagtcgccctccccgatgtgtccggcgctgcctatatgctctcctccgagaacatcgactactttgtcaagatgctcttctttgtgtgtaagtttctggatggcaaagaaatcaacgagctgctgtgcgctctgatcaacaaatttgataatattgccgatattctggatgctgccgctcaatgtggctcctccgtctggttcgtggacagctataggttcttcgagagatctaggaggattagcgcccagattagaatcgtgaagaacatcgcttccaaggattttaagaaatccaagaaggattccgatgagagctaccccgagcagctgtatctggatgctctggctctgctcggagacgtcatctccaagtacaagcagaatagagatggcagcgtcgtcatcgatgaccaaggcaatgccgtgctgacagagcaatacaagaggtttagatatgaatttttcgaggagatcaagagggacgaaagcggcggcatcaagtacaagaagtccggaaaacccgagtacaaccatcagagaaggaattttattctgaataatgtgctgaaaagcaaatggtttttctatgtggtgaagtacaataggcccagcagctgcagagaactgatgaagaataaggaaattctgaggttcgtgctgagagacatccccgactcccaagtgagaagatactttaaggccgtccaaggagaggaagcttacgctagcgccgaagctatgaggacaagactggtcgacgctctgtcccaatttagcgtcacagcttgtctggatgaagtgggcggcatgacagacaaggaattcgcctcccagagggccgtcgatagcaaagaaaaactgagagccatcatcagactgtatctgacagtcgcctatctgattaccaagagcatggtgaaggtgaatacaaggtttagcattgcctttagcgtgctggagagggactactatctgctcattgacggcaagaagaaatccagcgactacaccggagaggatatgctggctctgaccagaaaatttgtgggcgaagatgctggactgtatagagagtggaaagagaagaacgctgaagccaaggacaaatattttgacaaggccgaaaggaagaaggtgctgagacagaacgataagatgatcagaaagatgcacttcacaccccactccctcaattacgtccaaaagaatctcgaaagcgtccagagcaacggactggccgccgtcatcaaggaatatagaaatgccgtcgctcacctcaatatcatcaatagactggacgagtacattggctccgctagggctgatagctactactctctgtactgttactgcctccaaatgtatctgagcaagaacttcagcgtgggctacctcatcaacgtgcaaaagcagctggaggagcaccacacctacatgaaggatctcatgtggctgctcaacatccccttcgcttacaacctcgccagatacaaaaatctgtccaacgaaaaactcttttacgacgaggaagccgccgccgaaaaggctgacaaggctgagaacgagagaggcgaaggaagccccaagaagaaaaggaaggtcggcggatctgagcagaaactgattagcgaagaggatctctaagcggccgcgataatcaacctctggattacaaaatttgtgaaagattgactggtattcttaactatgttgctccttttacgctatgtggatacgctgctttaatgcctttgtatcatgctattgcttcccgtatggctttcattttctcctccttgtataaatcctggttagttcttgccacggcggaactcatcgccgcctgccttgcccgctgctggacaggggctcggctgttgggcactgacaattccgtgggttaacttgtttattgcagcttataatggttacaaataaagcaatagcatcacaaatttcacaaataaagcatttttttcactgcattctagttgtggtttgtccaaactcatcaatgtatctta

SEQ ID NO: 595 - DNA, 4587 bp, Artificial Sequence
  dCas13d AAV vector with ITR
cctgcaggcagctgcgcgctcgctcgctcactgaggccgcccgggcgtcgggcgacctttggtcgcccggcctcagtgagcgagcgagcgcgcagagagggagtggccaactccatcactaggggttcctgcggccggtcgcgtctagtaaccggctagttgatccgagctgagggcctatttcccatgattccttcatatttgcatatacgatacaaggctgttagagagataattggaattaatttgactgtaaacacaaagatattagtacaaaatacgtgacgtagaaagtaataatttcttgggtagtttgcagttttaaaattatgttttaaaatggactatcatatgcttaccgtaacttgaaagtatttcgatttcttggctttatatatcttgtggaaaggacgaaacaccgtagccctgcagtaaggcagggttctaagaccagcagcagcagcagcagcagcagcattttttggtaccgatatcgtttaaacaggagtgggaattggctccggtgcccgtcagtgggcagagcgcacatcgcccacagtccccgagaagttggggggaggggtcggcaattgaaccggtgcctagagaaggtggcgcggggtaaactgggaaagtgatgtcgtgtactggctccgcctttttcccgagggtgggggagaaccgtatataagtgcagtagtcgccgtgaacgttctttttcgcaacgggtttgccgccagaacacagaattccaggtaagtcccgcagccgtaacgaccttgggggggtgtgagattctcattctaattttgaagaatattaggtgtaaaagcaagaaatacaatgatcctgaggtgacacgcttatgttttacttttaaactaggtgaaacgcgtgccgccaccatgaagaagaagcaccagagcgccgccgagaagaggcaagtgaagaagctcaagaatcaagagaaggcccagaagtacgctagcgagccttcccccctccagagcgatacagctggcgtggaatgctcccagaaaaagacagtcgtcagccacattgccagctccaagacactggccaaggctatgggactcaaatccacactggtcatgggcgacaagctggtcatcaccagctttgctgctagcaaggctgtcggaggcgctggctacaaaagcgctaacattgaaaaaatcacagatctgcaaggaagggtcattgaggagcacgaaaggatgtttagcgccgatgtcggagagaaaaatatcgaactgagcaagaatgactgccacaccaacgtcaacaaccccgtggtgaccaacatcggaaaggattacatcggactgaaatctaggctggagcaagagtttttcggcaagacattcgagaatgacaatctgcatgtgcagctggcctacaatatcctcgacatcaagaaaattctgggaacctatgtgaacaatatcatttatatcttctacaatctgaatagggctggcaccggcagagatgagaggatgtatgacgacctcatcggcacactgtacgcttacaaacccatggaggctcaacagacctatctgctcaaaggcgacaaggatatgaggaggtttgaggaggtgaaacagctgctgcaaaacacctccgcttactatgtgtattacggcacactgttcgagaaggtgaaggctaagagcaagaaggaacagagggctaaggaggccgaaatcgacgcttgtaccgcccataactacgatgtgctgagactgctgtccctcatggcgcagctgtgcatgcactccgtcgctggaacagcctttaagctggctgagtccgctctgttcaacattgaggatgtgctcagcgccgatctgaaggaaatcctcgatgaagccttctccggcgccgtgaacaagctcaatgacggattcgtgcagcactccggcaacaatctgtacgtgctccagcagctgtaccctaatgagaccatcgagagaatcgccgagaagtactacagactcaccgtgaggaaggaggatctgaacatgggagtcaacattaaaaagctgagggagctgatcgtgggccaatactttcccgaggtcctcgacaaagaatacgacctctccaagaatggagacagcgtggtgacatacagaagcaagatttataccgtgatgaattacattctgctgtattacctcgaggaccacgactccagcagagaaagcatggtcgaagctctgagacaaaacagagagggcgatgaaggcaaggaggagatctatagacagtttgccaagaaggtgtggaacggcgtgtccggactgtttggcgtgtgtctgaacctcttcaagaccgaaaagagaaacaagtttaggagcaaagtcgccctccccgatgtgtccggcgctgcctatatgctctcctccgagaacatcgactactttgtcaagatgctcttctttgtgtgtaagtttctggatggcaaagaaatcaacgagctgctgtgcgctctgatcaacaaatttgataatattgccgatattctggatgctgccgctcaatgtggctcctccgtctggttcgtggacagctataggttcttcgagagatctaggaggattagcgcccagattagaatcgtgaagaacatcgcttccaaggattttaagaaatccaagaaggattccgatgagagctaccccgagcagctgtatctggatgctctggctctgctcggagacgtcatctccaagtacaagcagaatagagatggcagcgtcgtcatcgatgaccaaggcaatgccgtgctgacagagcaatacaagaggtttagatatgaatttttcgaggagatcaagagggacgaaagcggcggcatcaagtacaagaagtccggaaaacccgagtacaaccatcagagaaggaattttattctgaataatgtgctgaaaagcaaatggtttttctatgtggtgaagtacaataggcccagcagctgcagagaactgatgaagaataaggaaattctgaggttcgtgctgagagacatccccgactcccaagtgagaagatactttaaggccgtccaaggagaggaagcttacgctagcgccgaagctatgaggacaagactggtcgacgctctgtcccaatttagcgtcacagcttgtctggatgaagtgggcggcatgacagacaaggaattcgcctcccagagggccgtcgatagcaaagaaaaactgagagccatcatcagactgtatctgacagtcgcctatctgattaccaagagcatggtgaaggtgaatacaaggtttagcattgcctttagcgtgctggagagggactactatctgctcattgacggcaagaagaaatccagcgactacaccggagaggatatgctggctctgaccagaaaatttgtgggcgaagatgctggactgtatagagagtggaaagagaagaacgctgaagccaaggacaaatattttgacaaggccgaaaggaagaaggtgctgagacagaacgataagatgatcagaaagatgcacttcacaccccactccctcaattacgtccaaaagaatctcgaaagcgtccagagcaacggactggccgccgtcatcaaggaatatagaaatgccgtcgctcacctcaatatcatcaatagactggacgagtacattggctccgctagggctgatagctactactctctgtactgttactgcctccaaatgtatctgagcaagaacttcagcgtgggctacctcatcaacgtgcaaaagcagctggaggagcaccacacctacatgaaggatctcatgtggctgctcaacatccccttcgcttacaacctcgccagatacaaaaatctgtccaacgaaaaactcttttacgacgaggaagccgccgccgaaaaggctgacaaggctgagaacgagagaggcgaaggaagccccaagaagaaaaggaaggtcggcggatctgagcagaaactgattagcgaagaggatctctaagcggccgcgataatcaacctctggattacaaaatttgtgaaagattgactggtattcttaactatgttgctccttttacgctatgtggatacgctgctttaatgcctttgtatcatgctattgcttcccgtatggctttcattttctcctccttgtataaatcctggttagttcttgccacggcggaactcatcgccgcctgccttgcccgctgctggacaggggctcggctgttgggcactgacaattccgtgggttaacttgtttattgcagcttataatggttacaaataaagcaatagcatcacaaatttcacaaataaagcatttttttcactgcattctagttgtggtttgtccaaactcatcaatgtatcttaacgcggtaaccacgtgcggacccaacggccgcaggaacccctagtgatggagttggccactccctctctgcgcgctcgctcgctcactgaggccgggcgaccaaaggtcgcccgacgcccgggctttgcccgggcggcctcagtgagcgagcgagcgcgcagctgcctgcagg

SEQ ID NO: 596 - DNA, 4243 bp, Artificial Sequence
  dCas13d AAV vector
gagggcctatttcccatgattccttcatatttgcatatacgatacaaggctgttagagagataattggaattaatttgactgtaaacacaaagatattagtacaaaatacgtgacgtagaaagtaataatttcttgggtagtttgcagttttaaaattatgttttaaaatggactatcatatgcttaccgtaacttgaaagtatttcgatttcttggctttatatatcttgtggaaaggacgaaacaccgtagccctgcagtaaggcagggttctaagaccagcagcagcagcagcagcagcagcattttttggtaccgatatcgtttaaacaggagtgggaattggctccggtgcccgtcagtgggcagagcgcacatcgcccacagtccccgagaagttggggggaggggtcggcaattgaaccggtgcctagagaaggtggcgcggggtaaactgggaaagtgatgtcgtgtactggctccgcctttttcccgagggtgggggagaaccgtatataagtgcagtagtcgccgtgaacgttctttttcgcaacgggtttgccgccagaacacagaattccaggtaagtcccgcagccgtaacgaccttgggggggtgtgagattctcattctaattttgaagaatattaggtgtaaaagcaagaaatacaatgatcctgaggtgacacgcttatgttttacttttaaactaggtgaaacgcgtgccgccaccatgaagaagaagcaccagagcgccgccgagaagaggcaagtgaagaagctcaagaatcaagagaaggcccagaagtacgctagcgagccttcccccctccagagcgatacagctggcgtggaatgctcccagaaaaagacagtcgtcagccacattgccagctccaagacactggccaaggctatgggactcaaatccacactggtcatgggcgacaagctggtcatcaccagctttgctgctagcaaggctgtcggaggcgctggctacaaaagcgctaacattgaaaaaatcacagatctgcaaggaagggtcattgaggagcacgaaaggatgtttagcgccgatgtcggagagaaaaatatcgaactgagcaagaatgactgccacaccaacgtcaacaaccccgtggtgaccaacatcggaaaggattacatcggactgaaatctaggctggagcaagagtttttcggcaagacattcgagaatgacaatctgcatgtgcagctggcctacaatatcctcgacatcaagaaaattctgggaacctatgtgaacaatatcatttatatcttctacaatctgaatagggctggcaccggcagagatgagaggatgtatgacgacctcatcggcacactgtacgcttacaaacccatggaggctcaacagacctatctgctcaaaggcgacaaggatatgaggaggtttgaggaggtgaaacagctgctgcaaaacacctccgcttactatgtgtattacggcacactgttcgagaaggtgaaggctaagagcaagaaggaacagagggctaaggaggccgaaatcgacgcttgtaccgcccataactacgatgtgctgagactgctgtccctcatgaggcagctgtgcatggcctccgtcgctggaacagcctttaagctggctgagtccgctctgttcaacattgaggatgtgctcagcgccgatctgaaggaaatcctcgatgaagccttctccggcgccgtgaacaagctcaatgacggattcgtgcagcactccggcaacaatctgtacgtgctccagcagctgtaccctaatgagaccatcgagagaatcgccgagaagtactacagactcaccgtgaggaaggaggatctgaacatgggagtcaacattaaaaagctgagggagctgatcgtgggccaatactttcccgaggtcctcgacaaagaatacgacctctccaagaatggagacagcgtggtgacatacagaagcaagatttataccgtgatgaattacattctgctgtattacctcgaggaccacgactccagcagagaaagcatggtcgaagctctgagacaaaacagagagggcgatgaaggcaaggaggagatctatagacagtttgccaagaaggtgtggaacggcgtgtccggactgtttggcgtgtgtctgaacctcttcaagaccgaaaagagaaacaagtttaggagcaaagtcgccctccccgatgtgtccggcgctgcctatatgctctcctccgagaacatcgactactttgtcaagatgctcttctttgtgtgtaagtttctggatggcaaagaaatcaacgagctgctgtgcgctctgatcaacaaatttgataatattgccgatattctggatgctgccgctcaatgtggctcctccgtctggttcgtggacagctataggttcttcgagagatctaggaggattagcgcccagattagaatcgtgaagaacatcgcttccaaggattttaagaaatccaagaaggattccgatgagagctaccccgagcagctgtatctggatgctctggctctgctcggagacgtcatctccaagtacaagcagaatagagatggcagcgtcgtcatcgatgaccaaggcaatgccgtgctgacagagcaatacaagaggtttagatatgaatttttcgaggagatcaagagggacgaaagcggcggcatcaagtacaagaagtccggaaaacccgagtacaaccatcagagaaggaattttattctgaataatgtgctgaaaagcaaatggtttttctatgtggtgaagtacaataggcccagcagctgcagagaactgatgaagaataaggaaattctgaggttcgtgctgagagacatccccgactcccaagtgagaagatactttaaggccgtccaaggagaggaagcttacgctagcgccgaagctatgaggacaagactggtcgacgctctgtcccaatttagcgtcacagcttgtctggatgaagtgggcggcatgacagacaaggaattcgcctcccagagggccgtcgatagcaaagaaaaactgagagccatcatcagactgtatctgacagtcgcctatctgattaccaagagcatggtgaaggtgaatacaaggtttagcattgcctttagcgtgctggagagggactactatctgctcattgacggcaagaagaaatccagcgactacaccggagaggatatgctggctctgaccagaaaatttgtgggcgaagatgctggactgtatagagagtggaaagagaagaacgctgaagccaaggacaaatattttgacaaggccgaaaggaagaaggtgctgagacagaacgataagatgatcagaaagatgcacttcacaccccactccctcaattacgtccaaaagaatctcgaaagcgtccagagcaacggactggccgccgtcatcaaggaatatagaaatgccgtcgctcacctcaatatcatcaatagactggacgagtacattggctccgctagggctgatagctactactctctgtactgttactgcctccaaatgtatctgagcaagaacttcagcgtgggctacctcatcaacgtgcaaaagcagctggaggagcaccacacctacatgaaggatctcatgtggctgctcaacatccccttcgcttacaacctcgccagatacaaaaatctgtccaacgaaaaactcttttacgacgaggaagccgccgccgaaaaggctgacaaggctgagaacgagagaggcgaaggaagccccaagaagaaaaggaaggtcggcggatctgagcagaaactgattagcgaagaggatctctaagcggccgcgataatcaacctctggattacaaaatttgtgaaagattgactggtattcttaactatgttgctccttttacgctatgtggatacgctgctttaatgcctttgtatcatgctattgcttcccgtatggctttcattttctcctccttgtataaatcctggttagttcttgccacggcggaactcatcgccgcctgccttgcccgctgctggacaggggctcggctgttgggcactgacaattccgtgggttaacttgtttattgcagcttataatggttacaaataaagcaatagcatcacaaatttcacaaataaagcatttttttcactgcattctagttgtggtttgtccaaactcatcaatgtatctta

SEQ ID NO: 597 - DNA, 4587 bp, Artificial Sequence
  dCas13d AAV vector with ITR
cctgcaggcagctgcgcgctcgctcgctcactgaggccgcccgggcgtcgggcgacctttggtcgcccggcctcagtgagcgagcgagcgcgcagagagggagtggccaactccatcactaggggttcctgcggccggtcgcgtctagtaaccggctagttgatccgagctgagggcctatttcccatgattccttcatatttgcatatacgatacaaggctgttagagagataattggaattaatttgactgtaaacacaaagatattagtacaaaatacgtgacgtagaaagtaataatttcttgggtagtttgcagttttaaaattatgttttaaaatggactatcatatgcttaccgtaacttgaaagtatttcgatttcttggctttatatatcttgtggaaaggacgaaacaccgtagccctgcagtaaggcagggttctaagaccagcagcagcagcagcagcagcagcattttttggtaccgatatcgtttaaacaggagtgggaattggctccggtgcccgtcagtgggcagagcgcacatcgcccacagtccccgagaagttggggggaggggtcggcaattgaaccggtgcctagagaaggtggcgcggggtaaactgggaaagtgatgtcgtgtactggctccgcctttttcccgagggtgggggagaaccgtatataagtgcagtagtcgccgtgaacgttctttttcgcaacgggtttgccgccagaacacagaattccaggtaagtcccgcagccgtaacgaccttgggggggtgtgagattctcattctaattttgaagaatattaggtgtaaaagcaagaaatacaatgatcctgaggtgacacgcttatgttttacttttaaactaggtgaaacgcgtgccgccaccatgaagaagaagcaccagagcgccgccgagaagaggcaagtgaagaagctcaagaatcaagagaaggcccagaagtacgctagcgagccttcccccctccagagcgatacagctggcgtggaatgctcccagaaaaagacagtcgtcagccacattgccagctccaagacactggccaaggctatgggactcaaatccacactggtcatgggcgacaagctggtcatcaccagctttgctgctagcaaggctgtcggaggcgctggctacaaaagcgctaacattgaaaaaatcacagatctgcaaggaagggtcattgaggagcacgaaaggatgtttagcgccgatgtcggagagaaaaatatcgaactgagcaagaatgactgccacaccaacgtcaacaaccccgtggtgaccaacatcggaaaggattacatcggactgaaatctaggctggagcaagagtttttcggcaagacattcgagaatgacaatctgcatgtgcagctggcctacaatatcctcgacatcaagaaaattctgggaacctatgtgaacaatatcatttatatcttctacaatctgaatagggctggcaccggcagagatgagaggatgtatgacgacctcatcggcacactgtacgcttacaaacccatggaggctcaacagacctatctgctcaaaggcgacaaggatatgaggaggtttgaggaggtgaaacagctgctgcaaaacacctccgcttactatgtgtattacggcacactgttcgagaaggtgaaggctaagagcaagaaggaacagagggctaaggaggccgaaatcgacgcttgtaccgcccataactacgatgtgctgagactgctgtccctcatgaggcagctgtgcatggcctccgtcgctggaacagcctttaagctggctgagtccgctctgttcaacattgaggatgtgctcagcgccgatctgaaggaaatcctcgatgaagccttctccggcgccgtgaacaagctcaatgacggattcgtgcagcactccggcaacaatctgtacgtgctccagcagctgtaccctaatgagaccatcgagagaatcgccgagaagtactacagactcaccgtgaggaaggaggatctgaacatgggagtcaacattaaaaagctgagggagctgatcgtgggccaatactttcccgaggtcctcgacaaagaatacgacctctccaagaatggagacagcgtggtgacatacagaagcaagatttataccgtgatgaattacattctgctgtattacctcgaggaccacgactccagcagagaaagcatggtcgaagctctgagacaaaacagagagggcgatgaaggcaaggaggagatctatagacagtttgccaagaaggtgtggaacggcgtgtccggactgtttggcgtgtgtctgaacctcttcaagaccgaaaagagaaacaagtttaggagcaaagtcgccctccccgatgtgtccggcgctgcctatatgctctcctccgagaacatcgactactttgtcaagatgctcttctttgtgtgtaagtttctggatggcaaagaaatcaacgagctgctgtgcgctctgatcaacaaatttgataatattgccgatattctggatgctgccgctcaatgtggctcctccgtctggttcgtggacagctataggttcttcgagagatctaggaggattagcgcccagattagaatcgtgaagaacatcgcttccaaggattttaagaaatccaagaaggattccgatgagagctaccccgagcagctgtatctggatgctctggctctgctcggagacgtcatctccaagtacaagcagaatagagatggcagcgtcgtcatcgatgaccaaggcaatgccgtgctgacagagcaatacaagaggtttagatatgaatttttcgaggagatcaagagggacgaaagcggcggcatcaagtacaagaagtccggaaaacccgagtacaaccatcagagaaggaattttattctgaataatgtgctgaaaagcaaatggtttttctatgtggtgaagtacaataggcccagcagctgcagagaactgatgaagaataaggaaattctgaggttcgtgctgagagacatccccgactcccaagtgagaagatactttaaggccgtccaaggagaggaagcttacgctagcgccgaagctatgaggacaagactggtcgacgctctgtcccaatttagcgtcacagcttgtctggatgaagtgggcggcatgacagacaaggaattcgcctcccagagggccgtcgatagcaaagaaaaactgagagccatcatcagactgtatctgacagtcgcctatctgattaccaagagcatggtgaaggtgaatacaaggtttagcattgcctttagcgtgctggagagggactactatctgctcattgacggcaagaagaaatccagcgactacaccggagaggatatgctggctctgaccagaaaatttgtgggcgaagatgctggactgtatagagagtggaaagagaagaacgctgaagccaaggacaaatattttgacaaggccgaaaggaagaaggtgctgagacagaacgataagatgatcagaaagatgcacttcacaccccactccctcaattacgtccaaaagaatctcgaaagcgtccagagcaacggactggccgccgtcatcaaggaatatagaaatgccgtcgctcacctcaatatcatcaatagactggacgagtacattggctccgctagggctgatagctactactctctgtactgttactgcctccaaatgtatctgagcaagaacttcagcgtgggctacctcatcaacgtgcaaaagcagctggaggagcaccacacctacatgaaggatctcatgtggctgctcaacatccccttcgcttacaacctcgccagatacaaaaatctgtccaacgaaaaactcttttacgacgaggaagccgccgccgaaaaggctgacaaggctgagaacgagagaggcgaaggaagccccaagaagaaaaggaaggtcggcggatctgagcagaaactgattagcgaagaggatctctaagcggccgcgataatcaacctctggattacaaaatttgtgaaagattgactggtattcttaactatgttgctccttttacgctatgtggatacgctgctttaatgcctttgtatcatgctattgcttcccgtatggctttcattttctcctccttgtataaatcctggttagttcttgccacggcggaactcatcgccgcctgccttgcccgctgctggacaggggctcggctgttgggcactgacaattccgtgggttaacttgtttattgcagcttataatggttacaaataaagcaatagcatcacaaatttcacaaataaagcatttttttcactgcattctagttgtggtttgtccaaactcatcaatgtatcttaacgcggtaaccacgtgcggacccaacggccgcaggaacccctagtgatggagttggccactccctctctgcgcgctcgctcgctcactgaggccgggcgaccaaaggtcgcccgacgcccgggctttgcccgggcggcctcagtgagcgagcgagcgcgcagctgcctgcagg

SEQ ID NO: 598 - protein, 182 aa, Artificial Sequence
  PIN nuclease
QMELEIRPLFLVPDTNGFIDHLASLARLLESRKYILVVPLIVINELDGLAKGQETDHRAGGYARVVQEKARKSIEFLEQRFESRDSCLRALTSRGNELESIAFRSEDITGQLGNNDDLILSCCLHYCKDKAKDFMPASKEEPIRLLREVVLLTDDRNLRVKALTRNVPVRDIPAFLTWAQVG

SEQ ID NO: 599 - DNA, 130 bp, Artificial Sequence
  ITR
cctgcaggcagctgcgcgctcgctcgctcactgaggccgcccgggcgtcgggcgacctttggtcgcccggcctcagtgagcgagcgagcgcgcagagagggagtggccaactccatcactaggggttcct

SEQ ID NO: 600 - DNA, 141 bp, Artificial Sequence
  ITR
aggaacccctagtgatggagttggccactccctctctgcgcgctcgctcgctcactgaggccgggcgaccaaaggtcgcccgacgcccgggctttgcccgggcggcctcagtgagcgagcgagcgcgcagctgcctgcagg

SEQ ID NO: 601 - DNA, 3057 bp, Artificial Sequence; identical to SEQ ID NO: 540
  cas13d seq212

SEQ ID NO: 602 - DNA, 30 bp, Artificial Sequence
  myc tag
gagcagaaactgattagcgaagaggatctc

SEQ ID NO: 603 - DNA, 247 bp, Artificial Sequence
  WPRE
gataatcaacctctggattacaaaatttgtgaaagattgactggtattcttaactatgttgctccttttacgctatgtggatacgctgctttaatgcctttgtatcatgctattgcttcccgtatggctttcattttctcctccttgtataaatcctggttagttcttgccacggcggaactcatcgccgcctgccttgcccgctgctggacaggggctcggctgttgggcactgacaattccgtgg

SEQ ID NO: 604 - DNA, 63 bp, Artificial Sequence
  Rb-NLS
gaccgtgtgctcaaaagaagtgctgaaggaagcaaccctcctaaaccactgaaaaaactacgc

SEQ ID NO: 605 - DNA, 21 bp, Artificial Sequence
  linker sequence
gtggatactgccaatggcagc

SEQ ID NO: 606 - DNA, 567 bp, Artificial Sequence
  E17 endonuclease
ggtggtggcacccctaaggctcccaacctggagcctccactcccagaagaggaaaaggagggcagcgacctgagaccagtggtcatcgatgggagcaacgtggccatgagccatgggaacaaggaggtcttctcctgccggggcatcctgctggcagtgaactggtttctggagcggggccacacagacatcacagtgtttgtgccatcctggaggaaggagcagcctcggcccgacgtgcccatcacagaccagcacatcctgcgggaactggagaagaagaagatcctggtgttcacaccatcacgacgcgtgggtggcaagcgggtggtgtgctatgacgacagattcattgtgaagctggcctacgagtctgacgggatcgtggtttccaacgacacataccgtgacctccaaggcgagcggcaggagtggaagcgcttcatcgaggagcggctgctcatgtactccttcgtcaatgacaagtttatgccccctgatgacccactgggccggcacgggcccagcctggacaacttcctgcgtaagaagccactcactttggag

SEQ ID NO: 607 - DNA, 589 bp, Artificial Sequence
  WPRE
aatcaacctctggattacaaaatttgtgaaagattgactggtattcttaactatgttgctccttttacgctatgtggatacgctgctttaatgcctttgtatcatgctattgcttcccgtatggctttcattttctcctccttgtataaatcctggttgctgtctctttatgaggagttgtggcccgttgtcaggcaacgtggcgtggtgtgcactgtgtttgctgacgcaacccccactggttggggcattgccaccacctgtcagctcctttccgggactttcgctttccccctccctattgccacggcggaactcatcgccgcctgccttgcccgctgctggacaggggctcggctgttgggcactgacaattccgtggtgttgtcggggaaatcatcgtcctttccttggctgctcgcctgtgttgccacctggattctgcgcgggacgtccttctgctacgtcccttcggccctcaatccagcggaccttccttcccgcggcctgctgccggctctgcggcctcttccgcgtcttcgccttcgccctcagacgagtcggatctccctttgggccgcctccccgc

SEQ ID NO: 608 - DNA, 1060 bp, Artificial Sequence; identical to SEQ ID NO: 568
  human desmin full

SEQ ID NO: 609 - DNA, 352 bp, Artificial Sequence
  EFS/UBB promoter
gggcagagcgcacatcgcccacagtccccgagaagttggggggaggggtcggcaattgaaccggtgcctagagaaggtggcgcggggtaaactgggaaagtgatgtcgtgtactggctccgcctttttcccgagggtgggggagaaccgtatataagtgcagtagtcgccgtgaacgttctttttcgcaacgggtttgccgccagaacacagaattccaggtaagtcccgcagccgtaacgaccttgggggggtgtgagattctcattctaattttgaagaatattaggtgtaaaagcaagaaatacaatgatcctgaggtgacacgcttatgttttacttttaaactaggt

SEQ ID NO: 610 - protein, 10 aa, Artificial Sequence
  Myc Tag
EQKLISEEDL

SEQ ID NO: 611 - DNA, 9 bp, Artificial Sequence
  linker sequence
ggcggaagt

SEQ ID NO: 612 - DNA, 3057 bp, Artificial Sequence
  dead Cas13d
aagaagaagcaccagagcgccgccgagaagaggcaagtgaagaagctcaagaatcaagagaaggcccagaagtacgctagcgagccttcccccctccagagcgatacagctggcgtggaatgctcccagaaaaagacagtcgtcagccacattgccagctccaagacactggccaaggctatgggactcaaatccacactggtcatgggcgacaagctggtcatcaccagctttgctgctagcaaggctgtcggaggcgctggctacaaaagcgctaacattgaaaaaatcacagatctgcaaggaagggtcattgaggagcacgaaaggatgtttagcgccgatgtcggagagaaaaatatcgaactgagcaagaatgactgccacaccaacgtcaacaaccccgtggtgaccaacatcggaaaggattacatcggactgaaatctaggctggagcaagagtttttcggcaagacattcgagaatgacaatctgcatgtgcagctggcctacaatatcctcgacatcaagaaaattctgggaacctatgtgaacaatatcatttatatcttctacaatctgaatagggctggcaccggcagagatgagaggatgtatgacgacctcatcggcacactgtacgcttacaaacccatggaggctcaacagacctatctgctcaaaggcgacaaggatatgaggaggtttgaggaggtgaaacagctgctgcaaaacacctccgcttactatgtgtattacggcacactgttcgagaaggtgaaggctaagagcaagaaggaacagagggctaaggaggccgaaatcgacgcttgtaccgcccataactacgatgtgctgagactgctgtccctcatggcgcagctgtgcatggcctccgtcgctggaacagcctttaagctggctgagtccgctctgttcaacattgaggatgtgctcagcgccgatctgaaggaaatcctcgatgaagccttctccggcgccgtgaacaagctcaatgacggattcgtgcagcactccggcaacaatctgtacgtgctccagcagctgtaccctaatgagaccatcgagagaatcgccgagaagtactacagactcaccgtgaggaaggaggatctgaacatgggagtcaacattaaaaagctgagggagctgatcgtgggccaatactttcccgaggtcctcgacaaagaatacgacctctccaagaatggagacagcgtggtgacatacagaagcaagatttataccgtgatgaattacattctgctgtattacctcgaggaccacgactccagcagagaaagcatggtcgaagctctgagacaaaacagagagggcgatgaaggcaaggaggagatctatagacagtttgccaagaaggtgtggaacggcgtgtccggactgtttggcgtgtgtctgaacctcttcaagaccgaaaagagaaacaagtttaggagcaaagtcgccctccccgatgtgtccggcgctgcctatatgctctcctccgagaacatcgactactttgtcaagatgctcttctttgtgtgtaagtttctggatggcaaagaaatcaacgagctgctgtgcgctctgatcaacaaatttgataatattgccgatattctggatgctgccgctcaatgtggctcctccgtctggttcgtggacagctataggttcttcgagagatctaggaggattagcgcccagattagaatcgtgaagaacatcgcttccaaggattttaagaaatccaagaaggattccgatgagagctaccccgagcagctgtatctggatgctctggctctgctcggagacgtcatctccaagtacaagcagaatagagatggcagcgtcgtcatcgatgaccaaggcaatgccgtgctgacagagcaatacaagaggtttagatatgaatttttcgaggagatcaagagggacgaaagcggcggcatcaagtacaagaagtccggaaaacccgagtacaaccatcagagaaggaattttattctgaataatgtgctgaaaagcaaatggtttttctatgtggtgaagtacaataggcccagcagctgcagagaactgatgaagaataaggaaattctgaggttcgtgctgagagacatccccgactcccaagtgagaagatactttaaggccgtccaaggagaggaagcttacgctagcgccgaagctatgaggacaagactggtcgacgctctgtcccaatttagcgtcacagcttgtctggatgaagtgggcggcatgacagacaaggaattcgcctcccagagggccgtcgatagcaaagaaaaactgagagccatcatcagactgtatctgacagtcgcctatctgattaccaagagcatggtgaaggtgaatacaaggtttagcattgcctttagcgtgctggagagggactactatctgctcattgacggcaagaagaaatccagcgactacaccggagaggatatgctggctctgaccagaaaatttgtgggcgaagatgctggactgtatagagagtggaaagagaagaacgctgaagccaaggacaaatattttgacaaggccgaaaggaagaaggtgctgagacagaacgataagatgatcagaaagatgcacttcacaccccactccctcaattacgtccaaaagaatctcgaaagcgtccagagcaacggactggccgccgtcatcaaggaatatgcaaatgccgtcgctgccctcaatatcatcaatagactggacgagtacattggctccgctagggctgatagctactactctctgtactgttactgcctccaaatgtatctgagcaagaacttcagcgtgggctacctcatcaacgtgcaaaagcagctggaggagcaccacacctacatgaaggatctcatgtggctgctcaacatccccttcgcttacaacctcgccagatacaaaaatctgtccaacgaaaaactcttttacgacgaggaagccgccgccgaaaaggctgacaaggctgagaacgagagaggcgaa

SEQ ID NO: 613 - DNA, 9 bp, Artificial Sequence
  linker sequence
ggcggatct

SEQ ID NO: 614 - DNA, 30 bp, Artificial Sequence
  cas13d seq212 dr
tagccctgcagtaaggcagggttctaagac

SEQ ID NO: 615 - DNA, 3057 bp, Artificial Sequence
  dCas13d seq212 H919A
aagaagaagcaccagagcgccgccgagaagaggcaagtgaagaagctcaagaatcaagagaaggcccagaagtacgctagcgagccttcccccctccagagcgatacagctggcgtggaatgctcccagaaaaagacagtcgtcagccacattgccagctccaagacactggccaaggctatgggactcaaatccacactggtcatgggcgacaagctggtcatcaccagctttgctgctagcaaggctgtcggaggcgctggctacaaaagcgctaacattgaaaaaatcacagatctgcaaggaagggtcattgaggagcacgaaaggatgtttagcgccgatgtcggagagaaaaatatcgaactgagcaagaatgactgccacaccaacgtcaacaaccccgtggtgaccaacatcggaaaggattacatcggactgaaatctaggctggagcaagagtttttcggcaagacattcgagaatgacaatctgcatgtgcagctggcctacaatatcctcgacatcaagaaaattctgggaacctatgtgaacaatatcatttatatcttctacaatctgaatagggctggcaccggcagagatgagaggatgtatgacgacctcatcggcacactgtacgcttacaaacccatggaggctcaacagacctatctgctcaaaggcgacaaggatatgaggaggtttgaggaggtgaaacagctgctgcaaaacacctccgcttactatgtgtattacggcacactgttcgagaaggtgaaggctaagagcaagaaggaacagagggctaaggaggccgaaatcgacgcttgtaccgcccataactacgatgtgctgagactgctgtccctcatgaggcagctgtgcatgcactccgtcgctggaacagcctttaagctggctgagtccgctctgttcaacattgaggatgtgctcagcgccgatctgaaggaaatcctcgatgaagccttctccggcgccgtgaacaagctcaatgacggattcgtgcagcactccggcaacaatctgtacgtgctccagcagctgtaccctaatgagaccatcgagagaatcgccgagaagtactacagactcaccgtgaggaaggaggatctgaacatgggagtcaacattaaaaagctgagggagctgatcgtgggccaatactttcccgaggtcctcgacaaagaatacgacctctccaagaatggagacagcgtggtgacatacagaagcaagatttataccgtgatgaattacattctgctgtattacctcgaggaccacgactccagcagagaaagcatggtcgaagctctgagacaaaacagagagggcgatgaaggcaaggaggagatctatagacagtttgccaagaaggtgtggaacggcgtgtccggactgtttggcgtgtgtctgaacctcttcaagaccgaaaagagaaacaagtttaggagcaaagtcgccctccccgatgtgtccggcgctgcctatatgctctcctccgagaacatcgactactttgtcaagatgctcttctttgtgtgtaagtttctggatggcaaagaaatcaacgagctgctgtgcgctctgatcaacaaatttgataatattgccgatattctggatgctgccgctcaatgtggctcctccgtctggttcgtggacagctataggttcttcgagagatctaggaggattagcgcccagattagaatcgtgaagaacatcgcttccaaggattttaagaaatccaagaaggattccgatgagagctaccccgagcagctgtatctggatgctctggctctgctcggagacgtcatctccaagtacaagcagaatagagatggcagcgtcgtcatcgatgaccaaggcaatgccgtgctgacagagcaatacaagaggtttagatatgaatttttcgaggagatcaagagggacgaaagcggcggcatcaagtacaagaagtccggaaaacccgagtacaaccatcagagaaggaattttattctgaataatgtgctgaaaagcaaatggtttttctatgtggtgaagtacaataggcccagcagctgcagagaactgatgaagaataaggaaattctgaggttcgtgctgagagacatccccgactcccaagtgagaagatactttaaggccgtccaaggagaggaagcttacgctagcgccgaagctatgaggacaagactggtcgacgctctgtcccaatttagcgtcacagcttgtctggatgaagtgggcggcatgacagacaaggaattcgcctcccagagggccgtcgatagcaaagaaaaactgagagccatcatcagactgtatctgacagtcgcctatctgattaccaagagcatggtgaaggtgaatacaaggtttagcattgcctttagcgtgctggagagggactactatctgctcattgacggcaagaagaaatccagcgactacaccggagaggatatgctggctctgaccagaaaatttgtgggcgaagatgctggactgtatagagagtggaaagagaagaacgctgaagccaaggacaaatattttgacaaggccgaaaggaagaaggtgctgagacagaacgataagatgatcagaaagatgcacttcacaccccactccctcaattacgtccaaaagaatctcgaaagcgtccagagcaacggactggccgccgtcatcaaggaatatagaaatgccgtcgctgccctcaatatcatcaatagactggacgagtacattggctccgctagggctgatagctactactctctgtactgttactgcctccaaatgtatctgagcaagaacttcagcgtgggctacctcatcaacgtgcaaaagcagctggaggagcaccacacctacatgaaggatctcatgtggctgctcaacatccccttcgcttacaacctcgccagatacaaaaatctgtccaacgaaaaactcttttacgacgaggaagccgccgccgaaaaggctgacaaggctgagaacgagagaggcgaa

SEQ ID NO: 616 - DNA, 3057 bp, Artificial Sequence
  dCas13d seq212 H914A
aagaagaagcaccagagcgccgccgagaagaggcaagtgaagaagctcaagaatcaagagaaggcccagaagtacgctagcgagccttcccccctccagagcgatacagctggcgtggaatgctcccagaaaaagacagtcgtcagccacattgccagctccaagacactggccaaggctatgggactcaaatccacactggtcatgggcgacaagctggtcatcaccagctttgctgctagcaaggctgtcggaggcgctggctacaaaagcgctaacattgaaaaaatcacagatctgcaaggaagggtcattgaggagcacgaaaggatgtttagcgccgatgtcggagagaaaaatatcgaactgagcaagaatgactgccacaccaacgtcaacaaccccgtggtgaccaacatcggaaaggattacatcggactgaaatctaggctggagcaagagtttttcggcaagacattcgagaatgacaatctgcatgtgcagctggcctacaatatcctcgacatcaagaaaattctgggaacctatgtgaacaatatcatttatatcttctacaatctgaatagggctggcaccggcagagatgagaggatgtatgacgacctcatcggcacactgtacgcttacaaacccatggaggctcaacagacctatctgctcaaaggcgacaaggatatgaggaggtttgaggaggtgaaacagctgctgcaaaacacctccgcttactatgtgtattacggcacactgttcgagaaggtgaaggctaagagcaagaaggaacagagggctaaggaggccgaaatcgacgcttgtaccgcccataactacgatgtgctgagactgctgtccctcatgaggcagctgtgcatgcactccgtcgctggaacagcctttaagctggctgagtccgctctgttcaacattgaggatgtgctcagcgccgatctgaaggaaatcctcgatgaagccttctccggcgccgtgaacaagctcaatgacggattcgtgcagcactccggcaacaatctgtacgtgctccagcagctgtaccctaatgagaccatcgagagaatcgccgagaagtactacagactcaccgtgaggaaggaggatctgaacatgggagtcaacattaaaaagctgagggagctgatcgtgggccaatactttcccgaggtcctcgacaaagaatacgacctctccaagaatggagacagcgtggtgacatacagaagcaagatttataccgtgatgaattacattctgctgtattacctcgaggaccacgactccagcagagaaagcatggtcgaagctctgagacaaaacagagagggcgatgaaggcaaggaggagatctatagacagtttgccaagaaggtgtggaacggcgtgtccggactgtttggcgtgtgtctgaacctcttcaagaccgaaaagagaaacaagtttaggagcaaagtcgccctccccgatgtgtccggcgctgcctatatgctctcctccgagaacatcgactactttgtcaagatgctcttctttgtgtgtaagtttctggatggcaaagaaatcaacgagctgctgtgcgctctgatcaacaaatttgataatattgccgatattctggatgctgccgctcaatgtggctcctccgtctggttcgtggacagctataggttcttcgagagatctaggaggattagcgcccagattagaatcgtgaagaacatcgcttccaaggattttaagaaatccaagaaggattccgatgagagctaccccgagcagctgtatctggatgctctggctctgctcggagacgtcatctccaagtacaagcagaatagagatggcagcgtcgtcatcgatgaccaaggcaatgccgtgctgacagagcaatacaagaggtttagatatgaatttttcgaggagatcaagagggacgaaagcggcggcatcaagtacaagaagtccggaaaacccgagtacaaccatcagagaaggaattttattctgaataatgtgctgaaaagcaaatggtttttctatgtggtgaagtacaataggcccagcagctgcagagaactgatgaagaataaggaaattctgaggttcgtgctgagagacatccccgactcccaagtgagaagatactttaaggccgtccaaggagaggaagcttacgctagcgccgaagctatgaggacaagactggtcgacgctctgtcccaatttagcgtcacagcttgtctggatgaagtgggcggcatgacagacaaggaattcgcctcccagagggccgtcgatagcaaagaaaaactgagagccatcatcagactgtatctgacagtcgcctatctgattaccaagagcatggtgaaggtgaatacaaggtttagcattgcctttagcgtgctggagagggactactatctgctcattgacggcaagaagaaatccagcgactacaccggagaggatatgctggctctgaccagaaaatttgtgggcgaagatgctggactgtatagagagtggaaagagaagaacgctgaagccaaggacaaatattttgacaaggccgaaaggaagaaggtgctgagacagaacgataagatgatcagaaagatgcacttcacaccccactccctcaattacgtccaaaagaatctcgaaagcgtccagagcaacggactggccgccgtcatcaaggaatatgcaaatgccgtcgctcacctcaatatcatcaatagactggacgagtacattggctccgctagggctgatagctactactctctgtactgttactgcctccaaatgtatctgagcaagaacttcagcgtgggctacctcatcaacgtgcaaaagcagctggaggagcaccacacctacatgaaggatctcatgtggctgctcaacatccccttcgcttacaacctcgccagatacaaaaatctgtccaacgaaaaactcttttacgacgaggaagccgccgccgaaaaggctgacaaggctgagaacgagagaggcgaa

SEQ ID NO: 617 - DNA, 3057 bp, Artificial Sequence
  dCas13d seq212 H293A
aagaagaagcaccagagcgccgccgagaagaggcaagtgaagaagctcaagaatcaagagaaggcccagaagtacgctagcgagccttcccccctccagagcgatacagctggcgtggaatgctcccagaaaaagacagtcgtcagccacattgccagctccaagacactggccaaggctatgggactcaaatccacactggtcatgggcgacaagctggtcatcaccagctttgctgctagcaaggctgtcggaggcgctggctacaaaagcgctaacattgaaaaaatcacagatctgcaaggaagggtcattgaggagcacgaaaggatgtttagcgccgatgtcggagagaaaaatatcgaactgagcaagaatgactgccacaccaacgtcaacaaccccgtggtgaccaacatcggaaaggattacatcggactgaaatctaggctggagcaagagtttttcggcaagacattcgagaatgacaatctgcatgtgcagctggcctacaatatcctcgacatcaagaaaattctgggaacctatgtgaacaatatcatttatatcttctacaatctgaatagggctggcaccggcagagatgagaggatgtatgacgacctcatcggcacactgtacgcttacaaacccatggaggctcaacagacctatctgctcaaaggcgacaaggatatgaggaggtttgaggaggtgaaacagctgctgcaaaacacctccgcttactatgtgtattacggcacactgttcgagaaggtgaaggctaagagcaagaaggaacagagggctaaggaggccgaaatcgacgcttgtaccgcccataactacgatgtgctgagactgctgtccctcatggcgcagctgtgcatgcactccgtcgctggaacagcctttaagctggctgagtccgctctgttcaacattgaggatgtgctcagcgccgatctgaaggaaatcctcgatgaagccttctccggcgccgtgaacaagctcaatgacggattcgtgcagcactccggcaacaatctgtacgtgctccagcagctgtaccctaatgagaccatcgagagaatcgccgagaagtactacagactcaccgtgaggaaggaggatctgaacatgggagtcaacattaaaaagctgagggagctgatcgtgggccaatactttcccgaggtcctcgacaaagaatacgacctctccaagaatggagacagcgtggtgacatacagaagcaagatttataccgtgatgaattacattctgctgtattacctcgaggaccacgactccagcagagaaagcatggtcgaagctctgagacaaaacagagagggcgatgaaggcaaggaggagatctatagacagtttgccaagaaggtgtggaacggcgtgtccggactgtttggcgtgtgtctgaacctcttcaagaccgaaaagagaaacaagtttaggagcaaagtcgccctccccgatgtgtccggcgctgcctatatgctctcctccgagaacatcgactactttgtcaagatgctcttctttgtgtgtaagtttctggatggcaaagaaatcaacgagctgctgtgcgctctgatcaacaaatttgataatattgccgatattctggatgctgccgctcaatgtggctcctccgtctggttcgtggacagctataggttcttcgagagatctaggaggattagcgcccagattagaatcgtgaagaacatcgcttccaaggattttaagaaatccaagaaggattccgatgagagctaccccgagcagctgtatctggatgctctggctctgctcggagacgtcatctccaagtacaagcagaatagagatggcagcgtcgtcatcgatgaccaaggcaatgccgtgctgacagagcaatacaagaggtttagatatgaatttttcgaggagatcaagagggacgaaagcggcggcatcaagtacaagaagtccggaaaacccgagtacaaccatcagagaaggaattttattctgaataatgtgctgaaaagcaaatggtttttctatgtggtgaagtacaataggcccagcagctgcagagaactgatgaagaataaggaaattctgaggttcgtgctgagagacatccccgactcccaagtgagaagatactttaaggccgtccaaggagaggaagcttacgctagcgccgaagctatgaggacaagactggtcgacgctctgtcccaatttagcgtcacagcttgtctggatgaagtgggcggcatgacagacaaggaattcgcctcccagagggccgtcgatagcaaagaaaaactgagagccatcatcagactgtatctgacagtcgcctatctgattaccaagagcatggtgaaggtgaatacaaggtttagcattgcctttagcgtgctggagagggactactatctgctcattgacggcaagaagaaatccagcgactacaccggagaggatatgctggctctgaccagaaaatttgtgggcgaagatgctggactgtatagagagtggaaagagaagaacgctgaagccaaggacaaatattttgacaaggccgaaaggaagaaggtgctgagacagaacgataagatgatcagaaagatgcacttcacaccccactccctcaattacgtccaaaagaatctcgaaagcgtccagagcaacggactggccgccgtcatcaaggaatatagaaatgccgtcgctcacctcaatatcatcaatagactggacgagtacattggctccgctagggctgatagctactactctctgtactgttactgcctccaaatgtatctgagcaagaacttcagcgtgggctacctcatcaacgtgcaaaagcagctggaggagcaccacacctacatgaaggatctcatgtggctgctcaacatccccttcgcttacaacctcgccagatacaaaaatctgtccaacgaaaaactcttttacgacgaggaagccgccgccgaaaaggctgacaaggctgagaacgagagaggcgaa

SEQ ID NO: 618 - DNA, 3057 bp, Artificial Sequence
  dCas13d seq212 H298A
aagaagaagcaccagagcgccgccgagaagaggcaagtgaagaagctcaagaatcaagagaaggcccagaagtacgctagcgagccttcccccctccagagcgatacagctggcgtggaatgctcccagaaaaagacagtcgtcagccacattgccagctccaagacactggccaaggctatgggactcaaatccacactggtcatgggcgacaagctggtcatcaccagctttgctgctagcaaggctgtcggaggcgctggctacaaaagcgctaacattgaaaaaatcacagatctgcaaggaagggtcattgaggagcacgaaaggatgtttagcgccgatgtcggagagaaaaatatcgaactgagcaagaatgactgccacaccaacgtcaacaaccccgtggtgaccaacatcggaaaggattacatcggactgaaatctaggctggagcaagagtttttcggcaagacattcgagaatgacaatctgcatgtgcagctggcctacaatatcctcgacatcaagaaaattctgggaacctatgtgaacaatatcatttatatcttctacaatctgaatagggctggcaccggcagagatgagaggatgtatgacgacctcatcggcacactgtacgcttacaaacccatggaggctcaacagacctatctgctcaaaggcgacaaggatatgaggaggtttgaggaggtgaaacagctgctgcaaaacacctccgcttactatgtgtattacggcacactgttcgagaaggtgaaggctaagagcaagaaggaacagagggctaaggaggccgaaatcgacgcttgtaccgcccataactacgatgtgctgagactgctgtccctcatgaggcagctgtgcatggcctccgtcgctggaacagcctttaagctggctgagtccgctctgttcaacattgaggatgtgctcagcgccgatctgaaggaaatcctcgatgaagccttctccggcgccgtgaacaagctcaatgacggattcgtgcagcactccggcaacaatctgtacgtgctccagcagctgtaccctaatgagaccatcgagagaatcgccgagaagtactacagactcaccgtgaggaaggaggatctgaacatgggagtcaacattaaaaagctgagggagctgatcgtgggccaatactttcccgaggtcctcgacaaagaatacgacctctccaagaatggagacagcgtggtgacatacagaagcaagatttataccgtgatgaattacattctgctgtattacctcgaggaccacgactccagcagagaaagcatggtcgaagctctgagacaaaacagagagggcgatgaaggcaaggaggagatctatagacagtttgccaagaaggtgtggaacggcgtgtccggactgtttggcgtgtgtctgaacctcttcaagaccgaaaagagaaacaagtttaggagcaaagtcgccctccccgatgtgtccggcgctgcctatatgctctcctccgagaacatcgactactttgtcaagatgctcttctttgtgtgtaagtttctggatggcaaagaaatcaacgagctgctgtgcgctctgatcaacaaatttgataatattgccgatattctggatgctgccgctcaatgtggctcctccgtctggttcgtggacagctataggttcttcgagagatctaggaggattagcgcccagattagaatcgtgaagaacatcgcttccaaggattttaagaaatccaagaaggattccgatgagagctaccccgagcagctgtatctggatgctctggctctgctcggagacgtcatctccaagtacaagcagaatagagatggcagcgtcgtcatcgatgaccaaggcaatgccgtgctgacagagcaatacaagaggtttagatatgaatttttcgaggagatcaagagggacgaaagcggcggcatcaagtacaagaagtccggaaaacccgagtacaaccatcagagaaggaattttattctgaataatgtgctgaaaagcaaatggtttttctatgtggtgaagtacaataggcccagcagctgcagagaactgatgaagaataaggaaattctgaggttcgtgctgagagacatccccgactcccaagtgagaagatactttaaggccgtccaaggagaggaagcttacgctagcgccgaagctatgaggacaagactggtcgacgctctgtcccaatttagcgtcacagcttgtctggatgaagtgggcggcatgacagacaaggaattcgcctcccagagggccgtcgatagcaaagaaaaactgagagccatcatcagactgtatctgacagtcgcctatctgattaccaagagcatggtgaaggtgaatacaaggtttagcattgcctttagcgtgctggagagggactactatctgctcattgacggcaagaagaaatccagcgactacaccggagaggatatgctggctctgaccagaaaatttgtgggcgaagatgctggactgtatagagagtggaaagagaagaacgctgaagccaaggacaaatattttgacaaggccgaaaggaagaaggtgctgagacagaacgataagatgatcagaaagatgcacttcacaccccactccctcaattacgtccaaaagaatctcgaaagcgtccagagcaacggactggccgccgtcatcaaggaatatagaaatgccgtcgctcacctcaatatcatcaatagactggacgagtacattggctccgctagggctgatagctactactctctgtactgttactgcctccaaatgtatctgagcaagaacttcagcgtgggctacctcatcaacgtgcaaaagcagctggaggagcaccacacctacatgaaggatctcatgtggctgctcaacatccccttcgcttacaacctcgccagatacaaaaatctgtccaacgaaaaactcttttacgacgaggaagccgccgccgaaaaggctgacaaggctgagaacgagagaggcgaa

SEQ ID NO: 619 - DNA, 448 bp, Artificial Sequence
  human synapsin promoter
agtgcaagtgggttttaggaccaggatgaggcggggtgggggtgcctacctgacgaccgaccccgacccactggacaagcacccaacccccattccccaaattgcgcatcccctatcagagagggggaggggaaacaggatgcggcgaggcgcgtgcgcactgccagcttcagcaccgcggacagtgccttcgcccccgcctggcggcgcgcgccaccgccgcctcagcactgaaggcgcgctgacgtcactcgccggtcccccgcaaactccccttcccggccaccttggtcgcgtccgcgccgccgccggcccagccggaccgcaccacgcgaggcgcgagataggggggcacgggcgcgaccatctgcgctgcggcgccggcgactcagcgctgcctcagtctgcggtgggcagcggaggagtcgtgtcgtgcctgagagcgcag

SEQ ID NO: 620 - protein, 12 aa, Artificial Sequence
  linker sequence
AEAAAKEAAAKA

SEQ ID NO: 621 - protein, 17 aa, Artificial Sequence
  linker sequence
AEAAAKEAAAKEAAAKA

SEQ ID NO: 622 - protein, 22 aa, Artificial Sequence
  linker sequence
AEAAAKEAAAKEAAAKEAAAKA

SEQ ID NO: 623 - protein, 20 aa, Artificial Sequence
  linker sequence
YVEFEGEQGVDEGGVSGGGS

SEQ ID NO: 624 - protein, 20 aa, Artificial Sequence
  linker sequence
GSRNLDFQALEETTEYDGGY

SEQ ID NO: 625 - protein, 25 aa, Artificial Sequence
  linker sequence
ASSTSPVEISEWLDQKLTKSDRPEL

SEQ ID NO: 626 - protein, 16 aa, Artificial Sequence
  linker sequence
VNQCRRQSEDSTFYLG

SEQ ID NO: 627 - protein, 21 aa, Artificial Sequence
  linker sequence
AVSPLLLTTTNSSEGLSMGNY

SEQ ID NO: 628 - protein, 21 aa, Artificial Sequence
  linker sequence
LDEAYPGKKLLPDDPYEKACQ

SEQ ID NO: 629 - protein, 49 aa, Artificial Sequence
  linker sequence
SAAAATPAVRTVPQYKYAAGVRNPQQHLNAQPQVTMQQPAVHVQGQEPL

SEQ ID NO: 630 - protein, 15 aa, Artificial Sequence
  linker sequence
GGGGSEAAAKGGGGS

SEQ ID NO: 631 - protein, 25 aa, Artificial Sequence
  linker sequence
GGGGSEAAAKGGGGSEAAAKGGGGS

SEQ ID NO: 632 - protein, 26 aa, Artificial Sequence
  linker sequence
GGGGSSGSETGGTSESATGESGGGGS

SEQ ID NO: 633 - protein, 16 aa, Artificial Sequence
  linker sequence
SGSETPGTSESATPES

SEQ ID NO: 634 - DNA, 212 bp, Artificial Sequence
  human EF1a core promoter
gggcagagcgcacatcgcccacagtccccgagaagttggggggaggggtcggcaattgatccggtgcctagagaaggtggcgcggggtaaactgggaaagtgatgtcgtgtactggctccgcctttttcccgagggtgggggagaaccgtatataagtgcagtagtcgccgtgaacgttctttttcgcaacgggtttgccgccagaacacag

SEQ ID NO: 635 - DNA, 130 bp, Artificial Sequence
  modified UBB intron
gtaagtcccgcagccgtaacgaccttgggggggtgtgagattctcattctaattttgaagaatattaggtgtaaaagcaagaaatacaatgatcctgaggtgacacgcttatgttttacttttaaactag

SEQ ID NO: 636 - DNA, 304 bp, Artificial Sequence
  modified CMV enhancer
cgttacataacttacggtaaatggcccgcctggctgaccgcccaacgacccccgcccattgacgtcaataatgacgtatgttcccatagtaacgccaatagggactttccattgacgtcaatgggtggagtatttacggtaaactgcccacttggcagtacatcaagtgtatcatatgccaagtacgccccctattgacgtcaatgacggtaaatggcccgcctggcattatgcccagtacatgaccttatgggactttcctacttggcagtacatctacgtattagtcatcgctattaccatg

SEQ ID NO: 637 - DNA, 675 bp, Artificial Sequence
  eCMV-EFS-UBB promoter
cgttacataacttacggtaaatggcccgcctggctgaccgcccaacgacccccgcccattgacgtcaataatgacgtatgttcccatagtaacgccaatagggactttccattgacgtcaatgggtggagtatttacggtaaactgcccacttggcagtacatcaagtgtatcatatgccaagtacgccccctattgacgtcaatgacggtaaatggcccgcctggcattatgcccagtacatgaccttatgggactttcctacttggcagtacatctacgtattagtcatcgctattaccatggggcagagcgcacatcgcccacagtccccgagaagttggggggaggggtcggcaattgatccggtgcctagagaaggtggcgcggggtaaactgggaaagtgatgtcgtgtactggctccgcctttttcccgagggtgggggagaaccgtatataagtgcagtagtcgccgtgaacgttctttttcgcaacgggtttgccgccagaacacagaattccaggtaagtcccgcagccgtaacgaccttgggggggtgtgagattctcattctaattttgaagaatattaggtgtaaaagcaagaaatacaatgatcctgaggtgacacgcttatgttttacttttaaactaggtgaattcatggcgcgccacc

SEQ ID NO: 638 - protein, 644 aa, Artificial Sequence
  16PUFN5 sequence
GRSRLLEDFRNNRYPNLQLREIAGHIMEFSQDQHGNYFIQLKLERATPAERQLVFNEILQAAYQLMVDVFGSYVIRKFFEFGSLEQKLALAERIRGHVLSLALQMYGSNVIEKALEFIPSDQQNEMVRELDGHVLKCVKDQNGNHVVQKCIECVQPQSLQFIIDAFKGQVFALSTHPYGSYVIRRILEHCLPDQTLPILEELHQHIMEFSQDQHGSNFIELKLERATPAERQLVFNEILQAAYQLMVDVFGNYVIQKFFEFGSLEQKLALAERIRGHVLSLALQMYGSYVIRKALEFIPSDQQNEMVRELDGHVLKCVKDQNGSNVVEKCIECVQPQSLQFIIDAFKGQVFALSTHPYGNYVIQRILEHCLPDQTLPILEELHQHTEQLVQDQYGSYVIRHVLEHGRPEDKSKIVAEIRGNVLVLSQHKFASNVVEKCVTHASRTERAVLIDEVCTMNDGPHSALYTMMKDQYANYVVQKMIDVAEPGQRKIVMHKIRPHTEQLVQDQYGSYVIRHVLEHGRPEDKSKIVAEIRGNVLVLSQHKFASNVVEKCVTHASRTERAVLIDEVCTMNDGPHSALYTMMKDQYANYVVQKMIDVAEPGQRKIVMHKIRPHIATLRKYTYGKHILAKLEKYYMKNGVDLG

SEQ ID NO: 639 - protein, 644 aa, Artificial Sequence
  16PUFN0 sequence
GRSRLLEDFRNNRYPNLQLREIAGHIMEFSQDQHGNYFIQLKLERATPAERQLVFNEILQAAYQLMVDVFGSYVIRKFFEFGSLEQKLALAERIRGHVLSLALQMYGSNVIEKALEFIPSDQQNEMVRELDGHVLKCVKDQNGNHVVQKCIECVQPQSLQFIIDAFKGQVFALSTHPYGSYVIRRILEHCLPDQTLPILEELHQHTEQLVQDQYGSNVIEHVLEHGRPEDKSKIVAEIRGNVLVLSQHKFANYVVQKCVTHASRTERAVLIDEVCTMNDGPHSALYTMMKDQYASYVVRKMIDVAEPGQRKIVMHKIRPHIMEFSQDQHGSNFIELKLERATPAERQLVFNEILQAAYQLMVDVFGNYVIQKFFEFGSLEQKLALAERIRGHVLSLALQMYGSYVIRKALEFIPSDQQNEMVRELDGHVLKCVKDQNGSNVVEKCIECVQPQSLQFIIDAFKGQVFALSTHPYGNYVIQRILEHCLPDQTLPILEELHQHTEQLVQDQYGSYVIRHVLEHGRPEDKSKIVAEIRGNVLVLSQHKFASNVVEKCVTHASRTERAVLIDEVCTMNDGPHSALYTMMKDQYANYVVQKMIDVAEPGQRKIVMHKIRPHIATLRKYTYGKHILAKLEKYYMKNGVDLG

SEQ ID NO: 640 - protein, 349 aa, Artificial Sequence
  8PUF targeting CUGf3 (DM1) w/ stacking mutations to C
GRSRLLEDFRNNRYPNLQLREIAGHIMEFSQDQHGSRFIELKLERATPAERQLVFNEILQAAYQLMVDVFGNYVIQKFFEFGSLEQKLALAERIRGHVLSLALQMYGSRVIRKALEFIPSDQQNEMVRELDGHVLKCVKDQNGSHVVEKCIECVQPQSLQFIIDAFKGQVFALSTHPYGNRVIQRILEHCLPDQTLPILEELHQHTEQLVQDQYGSYVIRHVLEHGRPEDKSKIVAEIRGNVLVLSQHKFASNVVEKCVTHASRTERAVLIDEVCTMNDGPHSALYTMMKDQYANYVVQKMIDVAEPGQRKIVMHKIRPHIATLRKYTYGKHILAKLEKYYMKNGVDLG

SEQ ID NO: 641 - protein, 349 aa, Artificial Sequence
  8PUF targeting CUGf3 (DM1) w/ stacking mutations to C
GRSRLLEDFRNNRYPNLQLREIAGHIMEFSQDQHGSRFIELKLERATPAERQLVFNEILQAAYQLMVDVFGNYVIQKFFEFGSLEQKLALAERIRGHVLSLALQMYGSRVIRKALEFIPSDQQNEMVRELDGHVLKCVKDQNGSYVVEKCIECVQPQSLQFIIDAFKGQVFALSTHPYGNRVIQRILEHCLPDQTLPILEELHQHTEQLVQDQYGSYVIRHVLEHGRPEDKSKIVAEIRGNVLVLSQHKFASNVVEKCVTHASRTERAVLIDEVCTMNDGPHSALYTMMKDQYANYVVQKMIDVAEPGQRKIVMHKIRPHIATLRKYTYGKHILAKLEKYYMKNGVDLG

SEQ ID NO: 642 - protein, 349 aa, Artificial Sequence
  8PUF targeting CUGf3 (DM1) w/ stacking mutations to C
GRSRLLEDFRNNRYPNLQLREIAGHIMEFSQDQHGSRFIELKLERATPAERQLVFNEILQAAYQLMVDVFGNYVIQKFFEFGSLEQKLALAERIRGHVLSLALQMYGSRVIRKALEFIPSDQQNEMVRELDGHVLKCVKDQNGSNVVEKCIECVQPQSLQFIIDAFKGQVFALSTHPYGNRVIQRILEHCLPDQTLPILEELHQHTEQLVQDQYGSYVIRHVLEHGRPEDKSKIVAEIRGNVLVLSQHKFASNVVEKCVTHASRTERAVLIDEVCTMNDGPHSALYTMMKDQYANYVVQKMIDVAEPGQRKIVMHKIRPHIATLRKYTYGKHILAKLEKYYMKNGVDLG

SEQ ID NO: 643 - protein, 349 aa, Artificial Sequence
  8PUF targeting CUGf3 (DM1) w/ stacking mutations to C
GRSRLLEDFRNNRYPNLQLREIAGHIMEFSQDQHGSRFIELKLERATPAERQLVFNEILQAAYQLMVDVFGNYVIQKFFEFGSLEQKLALAERIRGHVLSLALQMYGSFVIRKALEFIPSDQQNEMVRELDGHVLKCVKDQNGSFVVEKCIECVQPQSLQFIIDAFKGQVFALSTHPYGNRVIQRILEHCLPDQTLPILEELHQHTEQLVQDQYGSYVIRHVLEHGRPEDKSKIVAEIRGNVLVLSQHKFASNVVEKCVTHASRTERAVLIDEVCTMNDGPHSALYTMMKDQYANYVVQKMIDVAEPGQRKIVMHKIRPHIATLRKYTYGKHILAKLEKYYMKNGVDLG

SEQ ID NO: 644 - protein, 349 aa, Artificial Sequence
  8PUF targeting CUGf3 (DM1) w/ stacking mutations to C
GRSRLLEDFRNNRYPNLQLREIAGHIMEFSQDQHGSRFIELKLERATPAERQLVFNEILQAAYQLMVDVFGNYVIQKFFEFGSLEQKLALAERIRGHVLSLALQMYGSFVIRKALEFIPSDQQNEMVRELDGHVLKCVKDQNGSYVVEKCIECVQPQSLQFIIDAFKGQVFALSTHPYGNRVIQRILEHCLPDQTLPILEELHQHTEQLVQDQYGSYVIRHVLEHGRPEDKSKIVAEIRGNVLVLSQHKFASNVVEKCVTHASRTERAVLIDEVCTMNDGPHSALYTMMKDQYANYVVQKMIDVAEPGQRKIVMHKIRPHIATLRKYTYGKHILAKLEKYYMKNGVDLG

SEQ ID NO: 645 - protein, 349 aa, Artificial Sequence
  8PUF targeting CUGf3 (DM1) w/ stacking mutations to C
GRSRLLEDFRNNRYPNLQLREIAGHIMEFSQDQHGSRFIELKLERATPAERQLVFNEILQAAYQLMVDVFGNYVIQKFFEFGSLEQKLALAERIRGHVLSLALQMYGSRVIRKALEFIPSDQQNEMVRELDGHVLKCVKDQNGSHVVEKCIECVQPQSLQFIIDAFKGQVFALSTHPYGNRVIQRILEHCLPDQTLPILEELHQHTEQLVQDQYGSFVIRHVLEHGRPEDKSKIVAEIRGNVLVLSQHKFASNVVEKCVTHASRTERAVLIDEVCTMNDGPHSALYTMMKDQYANYVVQKMIDVAEPGQRKIVMHKIRPHIATLRKYTYGKHILAKLEKYYMKNGVDLG

SEQ ID NO: 646 - protein, 349 aa, Artificial Sequence
  8PUF targeting CUGf3 (DM1) w/ stacking mutations to C
GRSRLLEDFRNNRYPNLQLREIAGHIMEFSQDQHGSRFIELKLERATPAERQLVFNEILQAAYQLMVDVFGNYVIQKFFEFGSLEQKLALAERIRGHVLSLALQMYGSRVIRKALEFIPSDQQNEMVRELDGHVLKCVKDQNGSYVVEKCIECVQPQSLQFIIDAFKGQVFALSTHPYGNRVIQRILEHCLPDQTLPILEELHQHTEQLVQDQYGSFVIRHVLEHGRPEDKSKIVAEIRGNVLVLSQHKFASNVVEKCVTHASRTERAVLIDEVCTMNDGPHSALYTMMKDQYANYVVQKMIDVAEPGQRKIVMHKIRPHIATLRKYTYGKHILAKLEKYYMKNGVDLG

SEQ ID NO: 647 - protein, 349 aa, Artificial Sequence
  8PUF targeting CUGf3 (DM1) w/ stacking mutations to C
GRSRLLEDFRNNRYPNLQLREIAGHIMEFSQDQHGSRFIELKLERATPAERQLVFNEILQAAYQLMVDVFGNYVIQKFFEFGSLEQKLALAERIRGHVLSLALQMYGSRVIRKALEFIPSDQQNEMVRELDGHVLKCVKDQNGSNVVEKCIECVQPQSLQFIIDAFKGQVFALSTHPYGNRVIQRILEHCLPDQTLPILEELHQHTEQLVQDQYGSFVIRHVLEHGRPEDKSKIVAEIRGNVLVLSQHKFASNVVEKCVTHASRTERAVLIDEVCTMNDGPHSALYTMMKDQYANYVVQKMIDVAEPGQRKIVMHKIRPHIATLRKYTYGKHILAKLEKYYMKNGVDLG

SEQ ID NO: 648 - protein, 349 aa, Artificial Sequence
  8PUF targeting CUGf3 (DM1) w/ stacking mutations to C
GRSRLLEDFRNNRYPNLQLREIAGHIMEFSQDQHGSRFIELKLERATPAERQLVFNEILQAAYQLMVDVFGNYVIQKFFEFGSLEQKLALAERIRGHVLSLALQMYGSFVIRKALEFIPSDQQNEMVRELDGHVLKCVKDQNGSFVVEKCIECVQPQSLQFIIDAFKGQVFALSTHPYGNRVIQRILEHCLPDQTLPILEELHQHTEQLVQDQYGSFVIRHVLEHGRPEDKSKIVAEIRGNVLVLSQHKFASNVVEKCVTHASRTERAVLIDEVCTMNDGPHSALYTMMKDQYANYVVQKMIDVAEPGQRKIVMHKIRPHIATLRKYTYGKHILAKLEKYYMKNGVDLG

SEQ ID NO: 649 - protein, 349 aa, Artificial Sequence
  8PUF targeting CUGf3 (DM1) w/ stacking mutations to C
GRSRLLEDFRNNRYPNLQLREIAGHIMEFSQDQHGSRFIELKLERATPAERQLVFNEILQAAYQLMVDVFGNYVIQKFFEFGSLEQKLALAERIRGHVLSLALQMYGSFVIRKALEFIPSDQQNEMVRELDGHVLKCVKDQNGSYVVEKCIECVQPQSLQFIIDAFKGQVFALSTHPYGNRVIQRILEHCLPDQTLPILEELHQHTEQLVQDQYGSFVIRHVLEHGRPEDKSKIVAEIRGNVLVLSQHKFASNVVEKCVTHASRTERAVLIDEVCTMNDGPHSALYTMMKDQYANYVVQKMIDVAEPGQRKIVMHKIRPHIATLRKYTYGKHILAKLEKYYMKNGVDLG

SEQ ID NO: 650 - protein, 644 aa, Artificial Sequence
  16PUF
GRSRLLEDFRNNRYPNLQLREIAGHIMEFSQDQHGNYFIQLKLERATPAERQLVFNEILQAAYQLMVDVFGSYVIRKFFEFGSLEQKLALAERIRGHVLSLALQMYGSNVIEKALEFIPSDQQNEMVRELDGHVLKCVKDQNGNHVVQKCIECVQPQSLQFIIDAFKGQVFALSTHPYGSYVIRRILEHCLPDQTLPILEELHQHTEQLVQDQYGSNVIEHVLEHGRPEDKSKIVAEIRGHIMEFSQDQHGNYFIQLKLERATPAERQLVFNEILQAAYQLMVDVFGSYVIRKFFEFGSLEQKLALAERIRGHVLSLALQMYGSNVIEKALEFIPSDQQNEMVRELDGHVLKCVKDQNGNHVVQKCIECVQPQSLQFIIDAFKGQVFALSTHPYGSYVIRRILEHCLPDQTLPILEELHQHTEQLVQDQYGSNVIEHVLEHGRPEDKSKIVAEIRGNVLVLSQHKFANYVVQKCVTHASRTERAVLIDEVCTMNDGPHSALYTMMKDQYASYVVRKMIDVAEPGQRKIVMHKIRPNVLVLSQHKFASNVVEKCVTHASRTERAVLIDEVCTMNDGPHSALYTMMKDQYANYVVQKMIDVAEPGQRKIVMHKIRPHIATLRKYTYGKHILAKLEKYYMKNGVDLG

SEQ ID NO: 651 - protein, 349 aa, Artificial Sequence
  8PUF targeting CUGf3 (DM1) w/ stacking mutations
GRSRLLEDFRNNRYPNLQLREIAGHIMEFSQDQHGSNFIELKLERATPAERQLVFNEILQAAYQLMVDVFGNYVIQKFFEFGSLEQKLALAERIRGHVLSLALQMYGSYVIRKALEFIPSDQQNEMVRELDGHVLKCVKDQNGSNVVEKCIECVQPQSLQFIIDAFKGQVFALSTHPYGNYVIQRILEHCLPDQTLPILEELHQHTEQLVQDQYGSYVIRHVLEHGRPEDKSKIVAEIRGNVLVLSQHKFASNVVEKCVTHASRTERAVLIDEVCTMNDGPHSALYTMMKDQYANYVVQKMIDVAEPGQRKIVMHKIRPHIATLRKYTYGKHILAKLEKYYMKNGVDLG

What is claimed is:

1. A composition comprising a nucleic acid sequence encoding an RNA-binding polypeptide comprising a non-guided RNA binding polypeptide or a guided RNA-binding polypeptide capable of binding a toxic target CUG repeat RNA sequence.

2. The composition of claim 1, wherein the RNA-binding polypeptide is a fusion protein.

3. The composition of claim 2, wherein the fusion protein comprises the RNA binding polypeptide fused to an endonuclease capable of cleaving the toxic CUG repeat RNA sequence.

4. The composition of any one of the preceding claims, wherein the non-guided RNA binding polypeptide is a PUF or PUMBY protein.

5. The composition of any one of the preceding claims, wherein the guided RNA-binding polypeptide is a Cas13d protein.

6. The composition of any one of the preceding claims, wherein the cas13d protein is catalytically dead.

7. The composition of any one of the preceding claims, wherein the cas13d protein comprises an amino acid sequence set forth in any one of SEQ ID NOs 583 or 586-589.

8. The composition of any one of the preceding claims, wherein the endonuclease is a nuclease domain of a ZC3H12A zinc-finger endonuclease.

9. The composition of any one of the preceding claims, wherein the PUF RNA binding protein comprises an amino acid sequence set forth in any one of SEQ ID NOs 444-451, 461, 570, or 638-649.

10. The composition of any one of the preceding claims, wherein the PUF RNA binding protein comprises an amino acid sequence set forth in SEQ ID NO: 444.

11. The composition of any one of the preceding claims, wherein the toxic target CUG RNA repeat sequence comprises any one of the nucleic acid sequences set forth in SEQ ID NOs 453-456.

12. The composition of any one of the preceding claims, wherein the toxic target CUG RNA repeat sequence comprises the nucleic acid sequence set forth in SEQ ID NO: 454.

13. The composition of any one of the preceding claims, wherein the CUG-targeting PUF protein is encoded by a nucleic acid sequence as set forth in SEQ ID NO: 452.

14. The composition of any one of the preceding claims, wherein the PUF or PUMBY protein is a human PUF or PUMBY protein.

15. The composition of any one of the preceding claims, wherein the PUF or PUMBY protein is linked to the ZC3H12A endonuclease by a linker sequence.

16. The composition of any one of the preceding claims, wherein the linker comprises the amino acid sequence set forth in SEQ ID NO: 411.

17. The composition of any one of the preceding claims, wherein the fusion protein comprises one or more signal sequences selected from the group consisting of a nuclear localization sequence (NLS), and a nuclear export sequence (NES).

18. The composition of any one of the preceding claims, wherein the ZC3H12A zinc finger nuclease comprises the amino acid sequence set forth in SEQ ID NO: 358 or SEQ ID NO: 359.

19. The composition of any one of the preceding claims, wherein the fusion protein comprises the amino acid sequence set forth in any one of SEQ ID NOs 559-567.

20. The composition of any one of the preceding claims, wherein the fusion protein is encoded by a nucleic acid sequence comprising SEQ ID NO: 460, SEQ ID NO: 516 or SEQ ID NO: 517.

21. The composition of any one of the preceding claims, wherein the nucleic acid molecule encoding the fusion protein comprises a promoter.

22. The composition of claim any one of the preceding claims, wherein the promoter is a tCAG promoter, an EFS/UBB promoter, a desmin promoter, a CK8e promoter, or an EFS promoter.

23. A vector comprising the composition of any one of the preceding claims.

24. The vector of claim 23, wherein the vector is selected from the group consisting of: adeno-associated virus (AAV), retrovirus, lentivirus, adenovirus, nanoparticle, micelle, liposome, lipoplex, polymersome, polyplex, and dendrimer.

25. The vector of claim 23, which is an AAV vector.

26. An AAV vector of any one of the preceding claims, wherein the AAV vector comprises:
a first AAV ITR sequence;
a first promoter sequence;
a polynucleotide sequence encoding for at least one CUG-repeat RNA binding polypeptide; and
a second AAV ITR sequence.

27. The AAV vector of any one of the preceding claims, wherein the CUG-repeat RNA binding polypeptide comprises a PUF or PUMBY protein.

28. The AAV vector of any one of the preceding claims, wherein the polynucleotide sequence encoding the PUF or PUMBY sequence comprises a nucleic acid sequence set forth in SEQ ID NO: 452.

29. The AAV vector of any one of the preceding claims, wherein the CUG-repeat RNA binding polypeptide comprises a Cas13d protein.

30. The AAV vector of any one of the preceding claims, wherein the polynucleotide sequence encoding the Cas13d sequence comprises a nucleic acid sequence set forth in SEQ ID NO: 601, 612, or 615-618.

31. The AAV vector of any one of the preceding claims, wherein the first promoter sequence comprises a nucleic acid sequence set forth in SEQ ID NO:568, 569, 608, 609, 634-637.

32. The AAV vector of any one of the preceding claims, wherein the first AAV ITR sequence comprises a nucleic acid sequence set forth in SEQ ID NO: 599 or 600.

33. The AAV vector of any one of the preceding claims, wherein the second AAV ITR sequence comprises a nucleic acid sequence set forth in SEQ ID NO: 599 or 600.

34. The AAV vector of any one of the preceding claims, wherein the vector further comprises a second promoter sequence.

35. The AAV vector of any one of the preceding claims, wherein the second promoter controls expression of a guide RNA (gRNA) wherein the gRNA comprises (i) a DR sequence and (ii) a spacer sequence.

36. The AAV vector of any one of the preceding claims, wherein the second promoter comprises a nucleic acid sequences set forth in SEQ ID NO: 519.

37. The AAV vector of any one of the preceding claims, wherein the vector further comprises a polyA sequence.

38. The AAV vector of any one of the preceding claims, wherein the vector comprises at least one linker sequence.

39. The AAV vector of any one of the preceding claims, wherein the vector comprises at least one nuclear localization sequence.

40. The AAV vector of any one of the preceding claims, wherein the vector is encoded be a nucleic set forth in any of one of SEQ ID NO: 574-582, 584-585, 590-597.

41. A pharmaceutical composition comprising:
a) the AAV viral vector of any one of claims 26-40; and
b) at least one pharmaceutically acceptable excipient and/or additive.

42. An AAV viral vector comprising:
a) an AAV vector of any one of the preceding claims; and
b) an AAV capsid protein.

43. The AAV viral vector of claim 42, wherein the AAV capsid protein is an AAV1 capsid protein, an AAV2 capsid protein, an AAV4 capsid protein, an AAV5 capsid protein, an AAV6 capsid protein, an AAV7 capsid protein, an AAV8 capsid protein, an AAV9 capsid protein, an AAV10 capsid protein, an AAV11 capsid protein, an AAV12 capsid protein, an AAV13 capsid protein, an AAVPHP.B capsid protein, an AAVrh74 capsid protein or an AAVrh.10 capsid protein.

44. The AAV viral vector of claim 21, wherein the AAV capsid protein is an AAV9 capsid protein

45. A cell comprising the vector of any one of the preceding claims.

46. A method of treating myotonic dystrophy type 1 (DM1) in a mammal comprising administering a composition or AAV vector according to any one of claims 1-45 to a toxic target CUG microsatellite repeat expansion (MRE) RNA sequence in tissues of the mammal whereby the level of expression of the toxic target RNA is reduced.

47. The method of claim 46, wherein the composition or AAV vector is administered to the subject intravenously, intrathecally, intracerebrally, intraventricularly, intranasally, intratracheally, intra-aurally, intra-ocularly, or peri-ocularly, orally, rectally, transmucosally, inhalationally, transdermally, parenterally, subcutaneously, intradermally, intramuscularly, intracisternally, intranervally, intrapleurally, topically, intralymphatically, intracisternally or intranerve.

48. The method of claim 46, wherein the composition or AAV vector is administered to the subject intravenously.

49. The method of claim 46, wherein the reduced level of expression of the toxic target RNA thereby ameliorates symptoms of DM1 in the mammal.

50. The method of claim 46, wherein the level of expression of the toxic target RNA is reduced compared to the reduction in the level of expression of untreated toxic target CUG RNA.

51. The method of claim 46, wherein the level of reduction is between 1-fold and 20-fold.
